United States Patent Application Publication US 2026/0275333 A1 - sequence listing, part 11

SEQ ID NO: 3045 - RNA, 64444167 nt, Homo sapiens (residues 21,481,391-23,629,529 of 64,444,167)
  source 1..64444167: mol_type = mRNA
actgtagccttgtagtatagtttgaagtcaggtagcgtgatgcctccagctttgttcttttggcttaggattgtcttggcaatgcgggctcttttttggttccacatgaactttaaagtagttttttccaattctgtgaagaaagtcattggtagcttgatggggatggcattgaatctataaattaccttgggcagtatggccattttcacaatattgattcttcctatccatgagcatggaatgttcttccatttgtttgtgtcctcttttatttcgttgagcagtggtttgtagttctccttgaagaggtccttcacatcccttgtaagttggactcctaggtattttattctctttgaaacaattgtatatgggagttcactcatgatttggctctctgtccgttattggtgtaaaggaatgcttgtaatttttgcacattgattttgtaccctgagactttgctgaaatttcttatcagcttaaggagattttgggctgagacgatgggattttctaaatacacaatcatgtcatctgcaaacagggacaatttcacttcctcttttcctaatggaatacactttatttctttctcttgcctgattgccctggccagaagttccaacactatgttgaatacaagtggtgaaagagggcatctctgtcttgtgccagttttcaaggggaatgcttccagtttttgctgattcagtatgatattggctgtgggtttgtcataaatagctcttattattttgagatacgtcccatcaatacctagtttattgagagtttttagcatgaaggcctgttgaattttgttgaaggcctttctgcatctattgagataatcacgtggtttttgtctttggttctgtttatatgctggattacgtttattgatttgtgtatgttgaaccagccttgcatcccagggatgaagccaacttgatcatggtggataagcttcttgatgttctgctggattctgtttgccagtattttattgaggatttttgcatcaatgttcatcagggatattggtctaaaattctcttttttggttgtgtctctgccaggctttggtatcaggatgatgttggcctcataaaatgagttagggaggattccctctttttctattgattggaatagtttcagaaggaatggtgccaggtcctctttgtacctctggtagaatttggctgtgaatccatctggtcctggactttttttgggtggtagactattaattattgcctcaatttcagaacctgttattggtctattcagagattcaacttcttcctggtttagtcttgggagggtgtatgtgtccaggaatttatccatttcttctagattttctagtttatttgcatagaggtgtttatagtattctctgatggtaggtagtatttctgtggcatcagtggtgatatcccctttatcattttttattgtgtctatttgattcttctctcttttcttctttattagtcttgctagcggtctatcaattttgttgatcttttcaaaaaaccagctcctggattcattgattttttgaagggttttttatgtctctgtctccttcagttctgctctgatcttagttatttctttccttctgctagcttttgaatgtgtttgctcttgcttctctagttcttttaattgtgatgttagggtgtcaattttagatctttcctgctttctcttgtgggcatttagtgctataaatttccctcacacactgctttaaatgtgtcccagagattctggtatgttgtgtctttgttcttattggtttcaaagaagatctttatttctgccttcatttcgttatgtacccagtagtcattcaggagcaggttgttcagtttccatgtagttgagcggttttgagtgagtttcttaatcctgagttctagtttgattgcactgtggtctgagagacagtttgttacaattcctgttctattacatttgctgaggagtgctttacttgcaactatgtggtcaatttttgaataagtgtgatgtggtgctgagaagaatgtatattctgttgatttggggtggaaagttctgtagatgtctattaggaaggcttggtgcagagctgagttcaattcctggatatccttgttaactttctgtctcgatctgtctaatgttgacagtggggtgttaatggacacactgtcttatggcaatgggtaagagttcagaagtactggcagaaattccaatttttttttaaatgtctgcttggacatttaaaatgtttgtcacttctgcttatatcccattggcaaaagcaagtcatatagccaagactaacatcaatgaaaaagggaagagacttgtcctattgggaaagaggggagagtgaatatttgttgaacagtagtacaatctaacacatacgccctatattgtactctgcagtgttacctaatgtggagccaaagatacagaaacataagaatcattccactttgggaagtatagtagactgagaacttcctgagggatccttctactgtggaacaattagacctttgctggacttaagtatgtaaggaaaatctccaatgggggtggggaggagtagcaaaaatataagtaagccgaaaccagagtggagaacaataagccaggcatgcaaacacacaaaggccattatcagcatttccagggttaaagggtgtgtgtgtgtgtgtgagtctggcagagaaagtctgggaggagagctggggatatagaaagcaaattcaaggctccaggattaagctgacaacctttgaaggggataaaagtgatcccaggtcattagtacccctggatctttgtagaatcacttacaaatccactctggagtaaagactgttcaatttaggctttcaagttttctatacaccaaaggtccaaatatgagctcaaaatcaaagattacagaacatacacacacgcaaagttcatgaggaatgacagcagaaaccaaaaaaaaaaaaaaacagattaagaccccaaggacttcagacattgaaatttcacctatagaatatagaataactatgtatggaagatggaatcacaaaaatgaagaatcagtaagagactaaaacataacaaagtggatttaaaaagaatcaattagaacttttagaaataaaaatataattgtctcccatccaagtactaacccaccctgaccctgcttagcttcccagatcaaacgagtttgggtgcattcagggtgatatggctgtagacaaaatataattgttaaaaaagttttattggatgaattaaactgaagactagtcataattaaaaactatgacagagctgaagaaatttcccaaaatgcagcgcagagaaataaagtaacaacacaaagggacaacacaattttaaaatgggcaaaggatttgaatagacattactccaaagaagacacacaaatgaccaataagcacatgaaaagatactcaacatcactggtcattagggaagtgcaaattaaaaccacagccaggtgccattttacatccactaagttggcctttaagaaatgaaataagtgttagcaaagatgtggagaaaatggaacccttgtgcattgctggtgggaatgtaaaatggtgcagccactgtggaaaaaagcatggtagttcctcaaaaaattaaaagttaacatatgatccagcatcctacctctagatatagacccaaaagaattgcaaagaagtactcaaatacttgtacatgaatgttcatagcagcactatcaacaatagccaaatgaaacaacccaaatgttcaactgatgaataaatcagcaaaatgtagtctatatagccaatagaatattattcaaccataaaaagagatgatgaactgattcatgctacactatggatcaacctcaaaaacattaaactaagtgaaagaagttatacataaaaggtcacatattgtatgattccatttatatgaaatatctagaatccacagagatagaaagcagactagtgggccaggagggagtgagaagtagggattgaatgtttaatggatatgggctttccttttggagtggtgaaaatatcttggaactagaaggaggtggtggttgtacaaacattgcaaatgtgctaaataccactgaattgtaaaactttaaaatggttaattttgttatgtgaggctggactgtgggggaaatgttgacttgaagagtcaatgggcccttcagggacatacatcctatagagtcagaaataggaaatctgaatttctagagcaggattttggcttgagaggtacacgagtgagttacccttgcatagatggtcataaatatatataaagaaaatatgaacaagagataaggaatcatgaaagataaaatgagaagatgtaacagatatctagtcagaattccagaagagataatacaaagaatgagacgtaatatttgaagaaattgtgcctaagaactttctgaaactgatgaaagatattaatctacaggtaaagaaaatgaaactcttggctgggcgcagtggccagataagcactgtgggattatctgccaaggcgggcagatcaccctgaagtcaggagttaaagaccagcctggccaacatggtgaaaccctgtctctactaaaaatacaaaaattagccaggcatggtggtgcacgcctgtaatccctgctatttgggaagctgaggcaggagaattgcttgaacccaggaggcagaggttgcagtgagcccagattgtgtcactgcactccaacctggatgacagagtaagactccatctaaaataaaaaataaaaaaaaaataaaaatgaaacttttgcatactaagataaataaaaggagaaacatacttaaattatagtggagccgcagaatcctgaagaccaagagaagaccaaaagttagatcaccaacaaagtaatggcggagttacagcagatttcacatcagcaatggaagctagaagaaagaaagtaccaacctagaattctacatccagcaaaaatatcctttaagaatggacatgaaataaaaacacattcacacaaaaacaaaaccagacagtcatcaatatatttctttctttattaaattttttgagacggagtctcactttgtcgcctaggctggagtgcactggcgtgatctcggctcactccgagctccacctcccgggttcatgccattctcctgcctcagcctcctgagtagctgagactacaggcgcctgccaccatgcccagctaattttttgtatttttagtagagacagggtttcaccatgttagccaggatggtcttgatttcctgaccttatgatctgcccgcctcagcctcccaaagtgctgggattacaggtgtgagccaccgtgcccggccaataaatttctaaagcatattctttgtttttcataaagctatatttattcaatttaaatgataacctttattctgaaattatgttcttcctaattttaggggctaaaatatgttttcttttacataatggtgttgatagcagatggttatttttttttattatttgtttgtttttgttttatgtccttagctggcaaaattaaagccagcaactaaggccccaatttttttttaaatacaaatctactggtgcttaaatctcagagcttaggaaccacagcctatgtaaaagccaatctttttgttgcatatttcacagtattgaattctttcttggtgagttctccatacaagttatgaagcaggataaaactcagtcttacatcaagtcagtgtaaatgtggccttaatttcaatcaccaaagaaatgtatttgtgttgtataccgtggttacagcatattttattaaaactaattatattagtacctacctatagagtatcaatttaaaaattataatgacatttctatgatgtcattacttttataggactagcctgtgtcacatgtgtgagcattattggtgcaatgcagaaataaagaaggctgggtgtccaagcaggccacttttctgggtcagggtttcagtggtaccatagatgggtgccagtttcaatgtacactttggcccatttatctttataaatcataccatatagcttcgatatttacatacatttaaactgagaagaaatatgcattacaagaaagcatagtttagtgggtttcgtgtgtcagaaacaactccatatttcataattatttttatgtcattagctacccttgataaagaacaattctatataaatgtccaaactggaacataattttgtaagaccttaaagagatctttgtaaactgcagtgtgtccacttataaacaaatcaaatcaattaatcaccatttcttcaaagtgtcaaaaacaaaagaatagctggacattaccttttataatcagcttcagagaaaatacaggaataatgatcaatggcattttggagcagataaaactgctgagttttatgtttgagtctatcattgtgtgatttgctataatagtattccttcctattagctgttctcaacaatattggttctatattcatttgatatgagcatttatattaaacttcaaaattacttctggtagtatccagaatatatgtcagagactcctaaaatcaacttctgttttcctcttaattaacatttggtcaaacgacaacttcagattttcaagaccagtagtgtgccttgcagtgaacatgcataggctggagcatctggccaagttaaaatgtagttatcaatgcttagttattcttggttttcttcagatagtgagccgtgtagacttgttcatatctgtggttattttaaaataaatccaagaaggcaggattgagattatggagcccagaagagcatggatcaggtatccattggttcaggatttgcaggcctcctgttttgattgcagatttcacaaacgtctccgaagagggcttatccaaagttggcttttggattttagccagttttgtagctaaaaagtatggcaggacactctgcacaaagatgcccttgctcctatactcctcatggaggcaccgagagaagaaatctacaaaagtcttggttgcagaataaatggtcaacagtgggacagggaacatgccactgccagatgagaggttcagaattgcccctttagatctttccaccaaagcatgttctttaagaaggaaaatgaaactagaagaaatgtcagagctagaggaaggaaagatgagcaaaggatttagtaagcatggcatatctaaagtttgttctacataaaatacaaagttctaatctgtggggcagcctgtcttagttcaggttcttccccgagcagagcctaagacgaatatttaggtacaaatcctttatttgggaaatgatgccaggaagcatcaataggggagtgaagtgtcttagtcttgagacaggaagcgaatagtgtgtgtaagaactgtccactgaagctgctggtgacttccaggctcaactggagagatacagcatgtcactaatagcatctttggtaggactggaattcaaaatgtataacactaaaatattaaacaaagtagggtttcagttgagaagtgggtgatcagagttaaatgttctaaagtattattcaagaaaaatattaagttttaggctgttgtaacaaagtaccatagactgagtagtttataaacaacagaaatttatgtctctcttttctaaaggctggaagtttaagattacagggccagcatggccaggttttggtggggacccacttctggattgcagacagctgacttctgattgtacctaatgtggcagagagcagagagaaggagagagagcttttttgtgtctttttataaggggaccaatcctattcacctaatcgttcccaaagtccccacttcctaacagcatcacactgggagttaggatctcaacatataaatttcagagagacacacagacatttggtccatagcagaaaggaagccaagagaagatgcatcaatgagcaagtaactgcttgctgttgacaacagggctcaaccccactgggaatcctctgaaaatctgtgtgtggcacattttagaattttctcaccaaagagtgatgaagttggggcatttatctactaactgctgttttgtattggctgagaactgccttttggcgtcagcttttctggcctgcagaatatgctcctgcaatcaatgaaaaccctcagaagagatatgcaggtgcttgagacaggcagccatcaatgtgtgtaagaactgtccactgaagctgctggtgacttccaggcttgactggggagatatggcagggcactcaacagcgtctgtggcaggattggaatccaaaatgtatagcactaaaacattaaacatcagcaggccttcatttgagaaatgggtgatcagagttaaatgttctaaagtattaaaggagaaatgttaagatattagtataagactattaaagtaaatgtgcaaggtaaaatttcaaagtttccactaaaagaatagaaatggattgtataacttctaaatcagttaagaggggcagaggaaaagatacaaaaagaaaaacaaataataaagagaaatatcagattgacctgggtgcaggttacaggtgataagtagagcaataagagagaagctgtgggggtggagcctaggcatgtgtacttttcacaagctcctcagcgattcttacacattctatagtttaggaaccacttgaatatagccagagcaacattctcaatggcttcctggaaaattttcatgggaaataaacatgcggcagaagcagtcttttgtttcaaaaagcacctccttgtggcagctttaaaatgcagctgcaaattctttaaacctctttttatcaagagttgtgacttagtctgcttgtgttgctatttaaaaaaaatctgagactgggtaatttataaagaacagaaatttatttctcacagtttgggaggctgggaagcccaagaccaaggcaccagcaggtttggtgtctggtgagagccgtttctgcttccgagatggttccgtgttgctgtatcctcctgaggggatgaatactgtgtccttgtgcagtggaagagcggaagagtgcatacccattcctgaagcccttttataagggccagaatctcatccacaagggctctgcccacatgacttaacctcctaaagcctccgcttcttaatactatcactttggattttaggctcccatgtacaaattttgggggccatattaagaccataacaaggtgggacctatcttctccctttaaatctgggtggactgctttgaccaatacagtgtggcagaagaattacattgtgaccaagaccaagtcataaaaagtcataaagcttctgtcttttccttagggaatcttggcttttggaactctaagatgcccaggtaagatgttcaattactctaagaccaccatgctggcaagggcacatgtagtcatctggttgatagtccatgacagtctgagctgagcccacttttagctttcccagcccggggaccacacatgggaataatgaagctttcctggaggtgattcctccagcactctggctctagcctccagtttagattatctgaggacccagacactgagaatcaaagataaactgtctctactctgctctgcctgaattcctggcctgcacaatctgtgcacagaatcaaatggtgttttatgccacgaaatgttgtggtgatttgttaagcatcaatatatagccagaacacctgaattaaaaatctgtcaaccgtacaaagactgtcactgtgctgctgtatctccatgcctccaaacccaaacccaaaagctactggtgcccctgtttgtatgagagaaagtgaagggatctcagtcaatgcagtggagatgaaaagaagcccaagaaaagcagtaacaactaggggtatgaagctggagcctgaggaaaggtacttgcacagaactggtgtctctctgtgttggcgtattctgcccataaccacctatacatcatgtacacggtcttcacttatgaccatgcctggaatccaaccaaatagagactctttatcctccttctgaaatgccaagatctgtaggagactgagtcctgcagctatttacattttaatgtcaagtaattcaatactgctttcttcctgacacctcagagagctgctgttctgggaggaataaaaaatttgaaagaaacaggagtggaaatctaggtgacagttctacgaaaccctttgaagaatagggcagagtgcctctgtctccccatccccccttttctcctctgacacttttaagtctctccttttctccaccacctcccttaggacacttgcctccttcttagaaggaaagcagtcccagatttcaattcctctttctttcttatgaactctagtggctttttcttcatttgggtgttagaggagctctccctacccggggttctgttgctctgagaatgatggctgcaccagctgtagttctatgggctgggatgtgctgtgggcactgcccttcccattttcactccctgacagcgctgttgcagctgcttgaatgcattctcaaaaacacaccagccacagccaggggctattcactttcttccaaagactccagtgtgacataaagaaaacctatttcttctagtagcattactttgaccagctttttttttttctagaattacccagagatgatcctaaaagacctgttctttgctttgaggcttactttcaccaaaagaatcctcaggagtaggcacagtgggtcacacctgtagtcccaactataccagaggctgaggggcagaaggatcacttgagcccaggagttccaggctgcagtgagctatgactgcacctgtcaatagccgctgaactctagcctgggagacgtagcaagaccccatctttgaaaaaaagaaaaagaaatgaagaaaagagttctcctgttagctgagattagctttctctggagctgcccagcacatagagttctgatgataagtggattcattccgatccccattccttttaccgatggaagtcaggtggggaaggaggggaagggagttgggtttcaggtaagtatgcactcaggtatgagaggtacctttgcttcctgccttcactgtgctccatgatagacatgtatgatatctgtgagatgtaattataacaactaaggttggactatggattgacagatggtgtctggtggtgatttttctaagcatcctctctgacatttcacattacaaaagatagcatttgccttttatttgatactactgaatgagctattcgttttgtagccagtagagcaaaaaggttaagatactagctcaggctttagacagcatggatttgaatcccaggtctgctatttactgtgtaatttcaagcaagtaacttaatcctttccacgatgctgttttcccatctatgaaatggttgcagtgagtagtactgtcacatagggatattgtcaggatagaatgagttaatacatagaaagcacttgcaacagtacctgaacatagtaaatactcagcaaatgtgaactacgatgattaaaaatcattttcttttaatgagtgatgagaagttatcatctaaaattgacttgttgtcatctcagcactcttcactataaaggcaactttataacgaaatataatgcattgtaaaggcaataaaaacgcagcctcattttgcaatactgggagttaaatcggcatcaacagcactccccgtcttcggtattgagagcttacctggctgggtatggataacttagacagcaagagaattacttcagaattaagacttcagatttcacctgggttgggcagctcctgttttgagcaacacttttctcaatcctgtttccaaatgtcttcttatgaaaatcagggccatcgttattttccttgtggattttgaataactcatagttcttaggtagacttgaccctttcacaggaagttttttcttataaagcctcttatattttagggtggaagattgctcagtcctccatctcttgggtaaacaacccacatcacacctgggccatgtttcttttgggaaaccaaagagaataaggtactcttattgaacatggatggtcagtgccgtcctggaaacaggacaaagcagaggtctgtggccacctttggcatggtcttatttgtttcgagtacaagttgctgtatcctttggaagaagattccagctaatgaacactaaaatacccacagagacacagagagcacactttaagtatgaagacaaaactcaactgtgaacaattgttggggtatggggaagaaagtagatgccctgagatgaccttggagatagcttttaacatctttagaagttaccattaagaagaaatctccaagaagatgacctctattttgaaaagcatctggtctattcaaaagtgtgcttgcaaaggagagaaatacaaaactaccaataggccaatgccacactaataattgctgcagcccaaatccatcgatagatgctaaaaccagagggcaaaatttgaagaggaacaggctattttcatggtctaagtaccccatcccaagatatttgctaattacaaagaggaaaaatagtaaacttatggtggagaaaccagacagatagcactttatccaacagatcaaggttaatatcaccagtgatacaacattaacatcatacacgcttgatatcatgtactgagagaagcccaacatcacttcggtggtattcttgcaaaaaaaaaaaatgcacagtttactctcaatcatgagaaaacaccagataaacccaaattgaaagacatttacaaggtaactgaccagtactctttacaagtttcagggtcatgaaagataagggaagactgagggactgtcccagattggagaagaaataagaagatacaactgaatggaaagtggggtcctggagttggtccttggccagaaggacagcagtggggaaaccggggaaatccaagtaaagtctgtagctaggaaggtcacaccagagttaatctcctggttttgatagtcacacaatggttatgtcaatatgttaatatttgaggagtctgggtgaagggtagatggaaactctctgaactatttttgtaattttggataagtctaaaataacttcaaaatacaaagttaaagaaaaaaatttaaaagtgtccttttcagcaggaagtctccaaatatagagaattgttttggtaggtttaattggcctggcagatgagaagccataaactggcttttaaaaaaaggaattataatacagaagtattcaaagcagattctccttaccttaagggaataattgaaataccaaaaataacaaataaaaaaatcaaagcttgtcctgttgacaaaatataccattgatatcatgaaagtaaacattcaatagcatattataaaatgtatttatgagtatgtggaaaagaactttatatttgtccaactgacatcttttcatagcacatcccaaatcctgacttctaaaagcatcgtagaaaacctagcggtgtgtttctttggttaaagctgtctttgttatcaaatttggcattataggtgagaaaagaaaaagaaatatgtatttttaaaaattaaaaataagcctgtcttaactccagagagaaaaataaacaaaggctcatacaacctgattaagaagttttaagattcactaaggtactgacattggggagactggtacaggtgtgtatttttctttgacacactcctttgcttttcacagcgttggcccagggctttttggagtgcacgttccctattaactttttcaggagagctgagcacagcctatcacttggatctttattaaactagagctctcacaggctccacattcaagattcattaggtgacaaatgccaggaagaaagacggatcatctggaaggatcctggattgttaatgcacttcagagttctctgatcatgatgattaataatctatgtaaaagtgacattttaatgaacacctttcatttctaccatgctttatgggctttatagcatttcctcattttatttcatcaacaaccgcgaacattgagtacctaccaggagtgggactcagattctgcccttgagtcaccgccagccaagctgaggagtgcggtggatgcacaggactaaacccctccatcagttgaaagaaaacctagaaattgggcaccaaggtaggagagagatgcagccgtttagggtagatggaaagactttctggtataggtcagaaggctgttctaggcctgcagtggggaagtaggtggcaggggcaggcacccagccagggaagtgaatggtagtgaagccccgtgccatgttttaaagcaagaatgtacaaaaccacatttacaaaggtttatttgaaacaatatgtagaaccagtcaagactggtggaaaaaactgaagaaagaagactaactggtacctgttattaataaaattagctgatactcattaagaggtcacttaaccagagcccatgctaaaggctttatgcaaataatcacatttaatatagtccagtattcctcagagctaaactcgggttagttgatcacagaactgggactttattttattttatcattattattttttgagacggagtctccctctgttgcctaggctggtgtgtagtggtgcgatctcagctcactgcaacctctgtctgccaggttcaagtgactctcatggagtagctgggattacaggtgcgtgccaccatgcccagctaatttttgtatttttagtagagacggggtttcaccatgttggccaggctggtctcgaacttctgaccttaggtgatccacccgcctcggcctcccagagtgctgcgatttacagacgtgagccactgcgcccagctggctgggactttaaaccattacttcacattcaaataatcataatggtagtaataggaagataatgagggagatgactttgtactaaacacccacaacagacaggtgctgtactcagtgctttgcagcccagtgctttgcctggacttgttgggagaatgggcaggggaagaagtgaatcagcactctgaatgcagacatccttgaaatattttgtcagcttgtgagcctgaagataaggctgtactgctaatgtatcaggaaagaccaagagggcagccagtggagagggagaaggggcactgttttgctttgagtaagctggggaccacttcctcgtgttggggggaaaacaatgatacgcagtaaaagaagaaaaaagggccagtctccttaaatttcaccgaaatagtgcaaactacaatttttcaagaatataatcaattattgggcggtccttagtgagtctggaattattaagaataaataaccctttttttttttttttttttttttttttttttttttttttttttttttttgagagggagtcttgctctgtcacccaggctggaatgcagtggcatgatctcggcacattgcaacctccatctcccgggttcaagcaattctcctgcctcagcctcccgagtagctgggattacagacatgagccgccacatctggctaatttttgtatttttagtagagacagggcttcactatgttggtcaggctggtctggaactcctgacctcaggagatccgcctgcctcggcctcccaaaatgctgggattacaggcatgagacactgtgcctggccaagtaatccaatttttaaaagatgggtaggttttagttagtaatgtcctttattttctgaagtctggtataaaaggcaggaatttttgttcatattaaaaagtcatctggaatagtttcagaattttatgtctcaaattactgccttttatttttgtgattaattgtgtttgaaaagatacatatttttagctattcttgttattattgctggaattatgcatgtagaaatatacattcaaacaatgtaggaggcacaaaatgggcagtttaaatcgcctcgacctactccgcagagactgcttttaattctggtggttattcacactgcatttaaattgtttatttaactcagaaaggacacatagttttaatgcttattaagagtttcattgtgtacaaaatggtatagcatattgtgtcaattttatgaagaggcaatggcccataatacgttttagacacagactttattgaaattttcagcagaaagctctaaaatgtcgatattaaatgtaaaagtatgtttttagtacatgccacaaccatgaacagcttcattctattactaaacggtcattaaaatattcatccaaattctatttgaataactttcatgtcttgtaaaatctgaagaacattttaaattgatggggtattagaatgttgaaagaaatacatttgcttttaagaccagccttatcagaattcgtgaaggctatattgtggcataaatgtatatattataaatgttggggaaacaaaaagaaaaaatcatataagagtggataacttcctgttgaatataatattaccagtttttttttttggggatttttattaaagcattcagtattgtcttctcgtacttttcagccacatagttgaactcaaatcagaacatgatcctccaactttatattcattaacagtaaggattcagacaagtgtggattgccttgtttatgttgtggcctctgcatgtgaaccctctgggttactgctgcaacacggattttcatccgcctcctcatttgattaattaacccagcttcggtcattgtttcagcagcccctgcacaggcagcctctccgccctggcccaccaagtctccactagaacctctttcatttcacccagggagtctggggaaggcgctggacagcggtgttcataattcctttgtctaattgcataggatcagggtgataaagtttaaaagggtgtttgcatcaagagtggttatttcaatttgccctgttaaattttcaccttttgctgatagatagcatgcctaattttatgaaatgccattatgttcacagaaaggagatgggagtggggaagggttaacataagagcaaatgctgcagcacatctcagcccctcacccagcctacatgtccattaagaccaaaattctacctcagggcagagctgcccttcaatactgttccttctgttgtctcaccgtgttgtagcccatggtgaccgcaggggctctgacacagagagcagtcctctgccttccatggcaccctcccaggggagggggaagtcctggctggtcctttcctttccttgactcacccggggttggcacaaagggcagctggtgggggaggggcagaggtgccggagcaaagggactctgtcaccctttgcaggataagagtccttaatctgcagtccctcatccccaaggggtagaattacctcttaatctaatttactttataacctaaactcattcttctgagaagggttctataggagtcttcagcctggcaaaggggcctgtgggacacaaagtgttaagaacctctggaaggtggcaccattcttccctccagctgagcagtaatggccatttcttactgctcagccactctctttgcttccccccaccccaattccagccagatacatagtaaggaatcaatcaagactcacatttttaaaatctctttattatttgtggaattttacacagcctgaggcatttttgatagagggcatagagtgtgtgaagagataaatctacattgccactcccagcccattctgtaacccctgccactgcggctgttcatttcagagtgggctgaggttccacagagcagctgaagagctgtgaatggtggttaattgcagtgatgttaattagcatgttataggaggtaagaagaggggattcacatttctctttttactgcttcaaacaaatgatctagatctttgctacataagccactggccacatgtggctatttaaatggaaattaataacaattaaagaaaaattaaagatcagttcctcgatcacactagctacatttctagcgcttgatagccacatgtggctagtggctgccatattggagaacatggatacagtacatttccatcaccgcaaatatccatggacagtggtgctgctagttctctacctcgctcacctgctgacttcagagcctagcctgggcctgtccttctggcttcctccttcccccgccccccaccccactcctttgtctcccatcctcatgcctctccccacctccctcaccccactgatatccttgtcatggaaaggtgtgacagggttcctgctgtgagttcagctccaccgttttgaagtggttcagcatattaactacctacctccctgcgatgccctgtgaattaggaagggcaggcatatccttttctattttttcggtaaccagtggggaaacgggctcagagagcagcgataagtaattaacttgtccaaggttgcacatggacaaaagccatcttctgatttctggtacaggcttttttctcatggtttgtgctttgtaaatgtttagggcagtcatagtcttaattttaaagacactatgttcaacatttcctgtgtctctcagcagggtttcactgtggaagtgcacgagagtgcagcagggagacctcgctgaccgtctcgctcctcagccacaggccacctggctttgtcagtttccttatctggaaaattcgtggagggagtcattacaaaatgatgctaagatttcctctggttccaatattcaacatattttttgattactttttactcatatggcttgatttatttcccaaatgattcaaggacccttttcaaaaggtcctccccttgatctggagcggccgtcactgtggcagctacctactgacagtgcaatagcaggccatctctagggtgacacctggaattgcctgccaagcccttgccacccaaagtgtggtcctgccccagcagcaccagcgtctccctggagctcatgagaaatgcagaatgccagggctgctgaacacgaatctgcattttatccaaatcccaggtgattcgtttgtatcccaaagcttgaggaactgtgatccaggccctggggaagcaagaatgagcacaactcacctgagtagaactcggccagaggggaatcaagcagacatgggggacgtgcccagctccagaccctcctagccacactggaacatggctgtcccctcagggtttgtccaggtgagtctgagctccttccctgggtacagtcattctttcggtgtggagaacacctttggctctggagtctatttactcagggactcattgtctgcactcacagcctctttcctccatctcattaatacgcagttgaagcactctgatttgcagcaggctttttacgcacaccctatggtcctgtaagatctttaaagttaggattagaatactggttctacaggatacacctagagttaggtggaccttgggccatgtgcttataagtccccaaaaggctcaagggaatgctgactttacattctgggagtccacaggaggcctagagaaacatgagggaaggaagaacaggatttcatcagattgggatttgggaaatggctgtttcaaatagaggagaggacaaggtgggatttagtgtacaaagacccaaggcgccgtcctcagaggcacagagagcatcatcatgtcatccaagccctatggagatgggtgaccgggatgttctggggctgatactggacacctgcctgctcctgggagggaaacggtgatccatctgcagaagcccctggccatggtggcagccaatggctggatgtgaaattcaagctagacgtggacattcctaatctgccttacctcacagatgggaagaacaggatcgtccacaatcctggacatcctggatcgtcccgcggcgctcacaagcacgcttcttcagagtgctgagactgaagaaggaaaggtgccaggagacatcagggaggaccaaatggtggaataccacctgcagctgaaacagctccaccatgaccctgacatgaaacatggaagcctccatactcggaactgcaacctgggcagctgaaacatttctccttgtttctgaggaagtcatggtttccagggggaaagctcacctttttggatattcttacctgtgatgtcttagatcagaactgtatgtttgagctcaagtgcctgtatgagttcccaaatctgaggacttcatgcaccacattgcagctttggaggaaagagctgcccctgtgcaatctgcctgttcttcgggatgccagtcagcagcgagatggcccagtggggaccaagagcgtatgctgagcaggacacagatgcacactgcgtgtttcgttccatcctgtctctaggggcctgcactctatcttctctgctcttttcaatagcatttaggctaaaaaacaaaacagaaaagtctgaagcagagagaaattcaagatagaactctaagaccaggtggcttaaacaacagaaatgtattttcttacagttctggaggctggaagtctaggatcaaggtgtcaggagggctggtttcttctgaggcctctctccttggcttgcaagtggcatttccttcccatgtcctcacatgccctcccctctgcgtgtctgtaccgatttcttcttctgctaaagacaccggtcatactgaagtagggcctaccctaatgaattcattttaacccagttagctctttaaaggttctatttctaaatatggtcacattttaagatactgggggttaggacttcaacatgaattttggggcacatggctcagccactcatctccacagcctcttctgaggaatgagagtggctctttctgcatgcagttgtcacaccctgtgcctgtgtcatgtgtccctgtgccttgagtgtccaagtcaaaagtaaccatatgggctggacttcgagaagccacttgcccctcaggtgttttggacactgaacctgaccaatgggggctctgcaaaccgggggtgcctccctgacccagtcagattctccctctaggaagggggactgccacattctgggagctcctttgtcataggaaaagaccaagtcactggctttgaggatgggtcctgagggaacaagtgccatagttctggacctgcacgagggcagctgtgtgtcccaggcttggccatgagaagccagagagatgggccagctgctgtttagtctccatgtccctcactacgtagttccctgtgctaactgcctccttgcagcccaaaaactctacttagtacagaaggacgcatcaacaatggacattcccaaggaacacatggggaaagaggccattaaaataggccctgaagtcatgagtgacctctggagaccaatgctaggtctaagataaaggcagagtaacagctcaagtgtctgtgtctttggggtcccccagatgcagaccctgagacaaagattcatgtgcaagtagttaatggggaccaacaaggaaatggaaaaatgagaaagtgaagggaaaaagaatcaacacgagaggtggtaatgagaagattgccactgaagacaactagggctcagtcccactgggggcctgtgggaaatggcgaacatgtctcagggttgttccacctggggccaggaagctgggccatatatcctgcaacctccacctgaaactgcgtgaagaccatgaactccccagccctagccacctgtctaatgggcccagcaccctcctgctcacctccaggcagagacttgcagatgctggcagcgggaagccagcacaagggaaaagggagtgcacaggggctgtgggcagtggctgcattctgcggcaagctctgcctcctcccctgagtcacagagcaggagttccaaccacagctctctctgctcaaagcagctggctgttcactgggtgaaaaggactgctgatttctgagcgatgccttgtggtcagaccatcaagtatcagatcctctgtcacagacacaaaaagctgattccttttgttttaccttctacatctaactatccttcatttcatacccattccacacaattcatcttaccctacagaggctgatggggtaattcttttattttgtagctagtaaagaaacatggagagatctggaagtagatacttaagtaaaattccttttaataattcttgtggttagacacagtggctcacatttgtaatcccagtgctttgggaggccaaggtgggaggatagcttgaggccaggagtttgagaccaaccttggaaacacagtgagaccacatctctacacaaaaataaaaaatagctgggcacggtggtgcctgcccgtggtcccagctcttgggaaggctgagacaggaggctcttttgagcccaggagttcaaggctgcaatgagctatgatagcatcaatgaactacatcctgggtgtcagagcgagatcctgtctcagaaaaaaaatgaaacaaaacaaagcaaaaagttgcaaatctctcagattagggagcccaacactatgcacagaagaacaagttaacttattttaccttttccccacattaggcaaaaaagtaatcatttaattaaagcagtaagatcaattggctactgaaaaatctattttttggtacacattatcatcctggggggagaggggagttgctcatgtcatcgaaaccatggaaggcccaggcccaggcccaggagtgagaacaggctccggagcgtgcccctcaggtgcaccctcagcctactccccctcagttctcaggggacactcgctggccgagatggccacttggcacccagtggaggtgctggtgtacatacaggcttccccgaggatgacaaggggttggcccagcccccaccaaccaggatgggacctgggcactggctgccagaggagaactggcagaaccctgccctgtggagaagtcacctaactgccttctgcagagtgggagggcatctttgtcctcccccacccctgcccactcttctggaataggagaggacgccctggtagatcccacctccactcccagaatgcttttctttgtcagaacactggcttgattataagatcgggtgcttaacttctctgaaacaggctcctctgcagaaggacagattggctatgatgatctgattagacgacgaggagaagcagcctggcctagaaggtgctcagtacgtggcagcggtgatggtcatcgtcttcaggtgcgagagaggctggggtcagcgacctggggctttctttgtatcattttatgaagaaaggtaaaaataccacaggcgagaacaagcagcaaagggcggatgagatttttcatctgcagctttgaattgatacctttaagtattgagctattcttttgttaggacagaacacgttattccattagaagagaacattttggggtggtggaagtgttccacgtcctgtgtggggtgacagttacacgcatgtcacatcagcagtctgaggagggaggggagaagggccgggctggataccttcagcctcttcatcgcactccaggcaccaagtgcaagggcagggagttttcattatttagggaatgcagccctggtgtagaggacacctcgcggagacatctcgagtcccgcaggtgtctgagctgcgctgcgcgccccagccgggaagccttttcttatccaaccgcgccgccccgcggaaagcctgggtactgcagacgccctcaccggcccaccgacagctggttttgaagcgggggcttagaaaagtaaaggggacagtgtttggagccacgatgcctttgatgtgaggcggttccacccaacaatcaacgaatcaagctggaactgcaggccctacttttgttggggggaggaccttaaggaatgtcacccccttgtcccctaccctctgccccacgcccagcctctcagaaggcaccaggcgtgagtagagtgcgaggcgtccacaccctcgtgtcccttccattcccggacacctttgcaccctagccgaggcctcagcacggagtgagggttgcctggggtgccctgctgtgtgtggggcgttcttgcctcccgggccctgaccccacggtctgggtcggcgaggcgtctctccctggcgtctggactgtgcgcctgccccgcttccaggcgacgaacggcaggagccgggggtccggcgggacccggatccagggcgggcggaaggcgagggtctctccttcccggaacccccgccccggaaacctgcaaccaaaccgggtccctcctccgcatcgctcccgcgctcccgggccgcctccccacgcgggcacccactctccgggccctcgcagcaccgccctctccgcgtccacccgcgcggccgacgccgccaggggccctgagatcgcggagacagcgcgccctggcgcctggtggggccctcccagtggccagagcgctcctggaccagtcggctgtggtctgtgcccaaacacgatggaaaccggggctgggacgggcggtggtacgcacgtggaggagaagaggcatggcgggaaaaccacagccgaacacaggtcgactcgcacctcccaggcacccgccgccgtctgactcgcggctctccccaaggttccgactcgccgccacctcttggcaccactcaccgggctccgacccgggccgcgagtccgctgatgcgcagctgcctccggcggctcccgggctctgcccggacccgcgcgcagagacgctcgggaacgctgggctcgggcgcctcctggcggcggcagcacgcggcacacgctcggttctccggcccgagggggcgcgtggagcgtacgcgggatccgcgcgcgggcctgggctgctggcccacatttccccgcttgctcggatggcggcgctgaggcctattcgcctctttattaataacgatgcctcgggagggaaaaaatagagcctttaaaaatcagagtgcgagagaggagtgtgtgtgtgtgtgtgtgtgtgtgtgtgtgtgtgtgtctcggggcgttggtgaaagcaataaaactcagatcgcttccttggcgagatagcggcggctataatgcgccggggggatcaggggtttatttgcagatcctggataaaagatgatatatcgacacggtttagagtgtcactgcgcttggcctctcagggagccacaagtacatatttcctgaaataccgcccagcacagtatctaatccgcccgccacttaacaccgggaggggaacttcagcagcgcacaagcgcgctcccggtttcctggttctgggtggggagagcccaaatgagaaggatctggtatgcctagacgccccctcccctggcctttgtcttcagtccaagtaatcacttagcgatgggccttaataaatacgtctgagaactgtccttatgctcggtaaatattggattagcttttcaatgaccaggctcttgaaaaggctcgagaaatacacaccaggtctcaactaagcccaacagtcaataggtaaggaaataagttatttccccatctgaggtggggaatgttgggaagggggacttccactcttaccaaattatctgattctactaaatatgaccgttgtactaaataggaaagggggcgcatccaagtttcccattagtcggaatttccaccagctcagttctgctcattaagggccgagtgactttgtggggaacatatctgggttccagtttttatttccacagagctcagcataaactatttttgtttagtacatatggtttatttggggactgcttatgggagttttgacctggcaattgcaggggagaaggcatgacccaaattatttccgactgcctcgcgccaatttggaccgcttagaggaggcaaaaaatgggcaaattccttggaagccctgctgtgtctccctggtactgaattttgtaagcacgcgatacaggagacattgaaaattaaagaggaagtatctccctcctccaacatggggagagacgctgttggaagaagtttctgaagtggtttcccatcgcaccaagaggccagtgggatggatccccgcgcataattcaaaggaacgcgcgcgtctttagctcttcggggttggtaaccaagtggtccggccgggcgcaagtcgccttggaaccggctgcagcccaagtctagctgggcccgggactgagcggcacccttggcctctcagaacctttctcgcggtgagtggaagggcggctccgcgcgcgggcgcttcggggccggtcggttgcgaaatcagggggtggattttcatctacccaggagccgctaagcccgtaggggaccgagcatcacccaggccctgggtaccctgagttgcctcctgagccccaggacggtccgatggtgcagagctcccaggcagaagttagtttcctgatacacacacagcagtgagcaaagtgcgcacaagtgagccaaaccctgaagacgcaggttcgcggactcccatcccagcgttagagtcaaggagacagaagagaggaaggagagaagtgaggaagggagagagattatgagaaaaagagattatgaaagtagagaaagagattatgagagcgagattatgagaagagagaaaaagagagattttgagagagagagacagaatgagagagatccaactttcagtgtcacggggcctaggcggggcaagcgccctccgaagccatcaaagacaggggtggctttttctcccctcctccagcctcctccccaatagatatagcacgaatttttaatgcgtcttcctttcacagacaacaatacagggtttgaaagccggacacaatttaggttttgtgcgggtccctcctcgcgctccctcggcccagctggccatatggaatccagcatggagcccgtggatgacaaagggacccagtgacaggcccaacaaaaccccaaggagacttctgcctgactccgggattcactgccggcgataagcgcgctgaatggtgcggggtggggcggggggtggggggcgggccccttctccttcttcccctctctctgtccccgcgatcctttctctgtccctttttaatatgcacgcctctaacatctccggctcccagctttcccattgtgcggttttgtaccgcccgctgtagattgggcgaagatagactgctgaagcggaccccgcgccgggtgcgctcccagggcgctggggttagggccacacagggctccgcaggcgcttttattgactccatggggacccgaggacagagagaggcgggcgccgggtccacctcccgggctcccggccggccacaggagcgcacacccagattgcaggcccgcggtcctggccacagctccaaatttgtcctcaatgagcaagtggtggaagcctgccagggtgaggaccttccacgcttcccccttcctctctggaaacctgagggtctcttgtgatcattctcaccctggaagccctggggcctggaaaagtcaaaatggcctcaggccttctgacagctccgctccaagagacttgaaaccctcacctttcctcccaagaggattttgggattaggggaagttgcaagtggatgttgagtggttagtaccagggcaggttgggcgttcaattattgcacaacaaactatttgggagaaattcgttggcctttaaaaacagtaagacataagcccccaaacattgccaagctagtgtggagaacaaagggagaccttttagcatttagaaaaactgccctttccccgaggatgagcccggagatgggaaaggacctttactggggtattagaaagacttccgagccctcaattatccaggggcggtgtggaacgcgggaataaagtgtcatcgcgtccctgggctgctgcgcagagtgctatcgacgcacagatttggtcgcacggataatcatgtttgctttagatattgaattaaacctgatcatcaactacagggagcgagaaagtcagctgggaccgctccttttgcccggcctcctcactgccacccaaccccccagccttgatggtgcagcttcggagagaacagagatacaatttccaaatgcgccgacgttcagtccctcagcgtctgcagcacccgctgggctctgagctagagtcccaagtatttttagaaacccgcgagatagaggagaaaggctcatcctccagttggccaggcttcctaagacgctcccccgcgtggccaagtgtgcgccagcatctgccaaggagatcttcctccagcaacaagggtgggacggaatccgttccccgccggaaagatggatgcgcccttcccgggcgtgcccggggctgtgtgcccacttcccatccggggagctcaccccacccccaaacctctacttcctagcaatccacccagttccacgctcaagggctgacctggggggaccgcacaccctggttcggaccgccgaacgctggagggaaggaggcccgggatccagtccccggagagaggcctggaagcccggaaaggatgggagcgtaagggaagggagaggcatggtttgctgggattgccaaagattctcgctccctggcttcctggggccaaagatcctagggagggctgcagtatcccctccctcccccgagcccagaaccccgcgtacttcccccaagccccctaagccaaagcctcgcgcgccctgaccgttcccacccccagccttagcggtctcctaggtcagcaccagcccgcagattttgaaaaggagtggggagtggggagaaggcagccagtcttaacctcagacccccacccacccactttcttagcgtgaggtaagtcaaatgtaacaaagtgaaagtcatcgagtgtagtggcttcaacagcttctcaggctgaaggagccactcatagatttgggccagcgaggggggtttgctctcctcgcctttgcggctcccgaagtcacttttcctcccgtagccggacgctgccgcccggggttcagacagcgcgcgagaccaggggagatgcgggggagggtgggcggccctgggcttccggccgaccgctcgcaggccggaggccgagcgttctcctccccgccccaatcctaggcgcggggtgcagcctgtggtcggaggggcctgcaccgggagccccgcccgccccagggccccggtacccccggcctccccgcccgagaggaaccgcctgtgggagccccgcgggcggccgggcccggctcccaggcccaggcctccggcccggcgcagtaggacaaacgggagggcagggattttttctttttttcttttttaaacacaggatttttattaaaattcttatttaaaaaatcgaaagctttctgcgcccggcgctgttggggaaccgcgccgaatagctgagctccaagttcggggctgaaggcccggaggacagggcagagggctccctgcctacagggttttcttttccatatttgagaaatgtttgcacaataaaataaaaagagaaaggaagaaagcaggggaaaacgcaaaaacaaaaacaaaacaaaaaacaaacccaaacaagccacaaagaaaggagttggacccagacgggaaacaggccggtcctgaaggtcattttggcaacaatcaccaccgatatttacaacgaaaagcgaaatctgccaccagttgtcagaacgtttacatggccataaatatttagcattttcttatttttttttaaaaaaaggaagaaattctctgtatttttaaagtgttctccacttgctttagaagacggctgacaatatcgctactcacacaaacatattttacaaaatgcacgaaagcaggggtggggggtcggtctttttctcgttttcaagtgacgacattaacgctgggacggtttggtccccccggggagaggcaaagaagcgaagctgcgcaaacattctgtaaacacggcgtagagttcagccctctcccaaggttcagaaggagaggcatgggcagagctgggtgggtggaatctgccactccaaggagacgcaggcaacctcccggcgcctccctagtggagccgagagtcaactcgactccataataataattataataataataataaccaccataaggaccgaggcctcctcgccgccaccgccgccggggtggggcctgggcctggggccgcgagtctcgttggggcggcgctcaccaagtccactgctgggcctggaccagggggtgtgctgtcgggtactggggggtgctggccgagctgtactgggcgttgtactgcatgtgctgcagcgactgcgcgctgtaggcagaaaagggaatgcccgcctggaaggtggcggctgccaggtcctgggctttgagcgcgtgacatggtttgccgtccctgaccaagacgggcacggccacccggcgcggcgagggcaggggcgtcacctccatacctttctcggcccgggcgcgcttcatcttgtagcggtggttctggaaccagatcttgacctgcgtgggcgtgaggcggatgaggctggccaggtgttcgcgctcgggcgccgacaggtaccgctgctgccgaaagcgccgctccagctcgtaggtctgcgccttggagaaaagcactcgccgctttcgcttcttgccggcgtcccccccgccgcccggggtctccttgtcattgtccggtgactcgtcggccgagggctccggggacttggagcttgagtcctgagggggcgccccggcagccagaccgtgcactggggggagggggagagagaagcgcgtcaggcgtctggaggccgcgcgcagcctgcaccagactcggagcaccctggatcctccgtgcgaccctggacctccgcgcctggcagcccagccccgctgcctttgccatgacccctgccttcctctacgcctgacgaagacgtcgggacctcccagggtaaagagggaaatccgtaggagtgggggctaggggctcgcctttcaaggggctcacatagtgtgggtgagaatttggggggggaagtggcactgaagatcatcgcgggttaagggctccggcgcccttaagcggtttcctctccggcgagacgtgggcagatttttaaaagaaataccccacaatcccagcattgatcggctcggccatttaaggcaggtttttgggggctttcgtttctgctttcgggccttctagacaccccctgcactgcacaaagcgtcctctatgatcgcgcagggggcagggtgagctatttatacccgggccacccgaagcctccccaccctccacccgtacccggacgaggctcgctggctacctccagggcgccaggccagtccctcccagcggccggagtccgggggctgcggctggagccatcggtccgggttgacatcatataccagcccctgggaggtatagcccttctccctctttctccttaacttctcgcattgaaaaaaattttggagaccaagttctttcccggaactaaggaggcttgaagaggagggcagaggacatcctatacaggtgttaaaaatctttctacggatccgagtgagggggtccgggcttacatggccccttcccctttcactcccagcgtccaacccgggctgcggctgcaggaatggaggggaccacggcctcggcagccaagttttgctacttacgggagtactgaaggccctcggtgctggccagccagcgcgtgtacgggttgtcgctgctgtcgtagaaggggttcttcaggggcaggctctgcaccgcgtccagggcgccctgccccagcggcccggccctcttggctggctcgggcccctcgttctcttcctccggaccttcggccacagagccctcctcatcgttggtgtccggcaggtctaagatgtccttgaccgaaaaccccgtctttgtgttggtcagcgacatggttcgagaccccaaaatttatgtcgcaaagttgtagcttcacttggtcaattcgtggcgctcccctgccccggcgggcgggggaggggggagttggggggagggactgggggaggggaggggggaattggctttaattattgggataattattatttttaaaaagagaaagaaactggggatggggaggaaaaaaatgaagcccaacccagtgcctctctctgtcttctttgaaagcacgcggaaatggacgcaggaagccgggcggcctgcgcgccgagcgccgcgggccccggccttagtttctaactccaggaggggtgccaaggcggcgtcagctcgggctccggcggccgctcggcgcgcggtggcggctggtggcgaggaaaaaatgggccattgcccgagcgatcagtccatataaggctgggctccactcacgaacctggggaggcggggagagggggagaaagagagggagggagggaaagaaagagggagggagggggagcgagagagggagcgggagaagggtggaaaaaagggggaagagacattaaaaacgcaaaggttggccacgtgtgggcgggtcttgggagtcaagtggatgaagacagtatttgcagatgtgaaattgtgggttttggggagctccgcgctcccagccaacggccctctagagcaagatgagaggtgtaacgtgtcaattaattgcaaagacggggcgagcctttttttttttaaacccagtatttacatacaaagggccaccgcgtcgctcgcgagtccacacacttgaaagggccgttttaacaaattgcatcttaaaaaaggtgggggtggggaggaggaggggagaaaacaaaacagaaaccaggaggagggaaaaaatcctctttaacattcaccggttcctacctccccgcccccgcgcgcccacccccggcaagccggaaaattggcgatttgtggcgcctttggaaaagggggagggggcgaaggccgagctgcggaaatctctcctttccatcgttggtggttgcctaaacaagatccggttcaaatggcaagagcccaacttctgtaagcctcctaggtcaatattttggttgaggcttaaggatgagtgctagaaatgacaaggcaagtaattgattccagttaaccgcgagagagcccaaaacccaggagagagctccgctccgggccggccagagccaccaccaagcgacccgcccccttccagccgccctttatttgctaaagactcatttatttccttcactccgcctccccccacctcccacccccaaccccccgcctccacctctctgcggccaaggaggacgcgcagttcactttctgctttgcgggcggtcccggggagggcggggtaagagtgaggagctccaacttcgtctggggtcggaccctggccctgctgcctctgggctctgcgggcctctttccccgggtggaggaaagggcagacggccctgctctttcctgccctctattatccctccctctccggccccctccctctccagcctctggctagaggtggagcagcgggaaggcggcggggcgggattgcgggggtgggggtgggggttgtgtctccagcctgggtgaagacccagaaagctgcgggggaggggggtcgctgggtggcccgacgatgcctcgttttctccccagttttcttctcccacgcgagttctttagtgtggtctctttttggacgccttgggtgcgttcggagtacgcgctccacgtttccaggttaagtcaggttagtgtgaagtttccagccactctcggctctgggaactgaactttcccgggacttgcacttcctcctcggcgctggggttggaaaagaccacgccgcatttgccaccccttcttctagttaaaacttttttggggggggggtgcaggggtgtagattggctacctgatgctcgttcgccccagaggagtgtcaggaaggagctttgtctgggggcggggaggggcacagaaggccacccctgcggggtccaggtctagtcttcccacaacctgggctcctccgcgcgggccaagctgagcgcgcgggcaccgggtcctcctcgcgcgcagctgcagcggacgccgccgcgccccagctgcccccgggttgccagcgctgggtgagggcacctctccccgagccgctcggcggctttctgcagccctagctgcctcgcccccagtatgtgacgtgggtgacaatggcccaggttagagcaagcccctcgtcggcgcgtcctgggtggtcggacccgggcaaacacaaatacaaaccgattgctaagctgcggacaatgagcgaaatgtagacaaatgtcccgctcccgttggaagcctttgtcccggctcggtttttgcatttatttcagtggcgaaataatacatgattgacgctctctttcaatgtgtcctaactgtttggaataaatctaaggttgttcctagttgtcatggcattcaacccttttcaatggactatctcttcattcatttctgaatccgtccacaatattaaggaaaccccttcatgtcgacgctccccgattcctctttctcctcctactttttcttttctcctttctccccctccttccccccttttttcccctggaagaattagaaacttgtttgaatcgtcttcctcgaacccattacttttcgtgctttttttttttttttgctcgctttccgtctctgtctttctcagcgccccccctcctccgccctttcacgtgggagctcgtcgctctgccccgtcggaggagggaagttggttctccaggagtcggggaagcgtcgagtttggatccaggggcgggagtgggcctgccactgctattgttactcagctgctaaataaataactggagagaaaaaaagttcctcaacccaagcgttgcagcaaagaccctccttttgttcctcctcttattcctcagtcctaagggggtggaggctgtcttggggtccagggcagccactaggttggggacccagaataggatctggttgggccaggcaaattcttgggtcaggtggcaaaggggtctttggcagcaagtgtcgtttctcgcatatccccagagccctcttaggtgggggagtgcccgcagaggcctcccaaagcgtgttcatttcttcagctgggaaccacctcgctgaagttccatgtagttcccaacttctctcccccttccccagcatagtgaccctttcttctcaggatctaaatcagcaccgctgctattgatcaagtcccctcccctcacccgtgggagcctgcaaggtccgcagagcgcctgagagaggattgctttcctaggggaatcctggctcctggaattaatcacggggagggagtgctgccataggcgcctagagaaggaggccctcagcccagttctcaaaggtcgggtttgcctttgcgcctgccccttagcctcaatgaccagccgaatccttctgggtctcagcttgcggtgtcctcttgtcggagcacctgaggcgcccacttcccctgccctcgcaggacgcctcctggactccggcccctcctacactttcaccccagcgagtcttccagtttttatttcccctggcctgggggcagctgggcagggagggagagaattggagagagcttcggccttgcctcctccgcgatcggtgcttccgggtccacagcactcagcctctcccgggacctcgagactcatttccccatcacttctcgtccgtgtggttcccgcgtccatttccagagcgttaacatttgcaattgaaaaggcgctgggagaccgctgggaggtccgtaattgaaggggagaaactgggcttgttagtggaagatcataaaatgcaagtcccccaggagcggcctgtggacgccgggaggcctgcgcaggcccagctggcggccagggcaagtccggtgcccagagcacagtccagtgtctcctcaatttcttgggcccggcttgcgcccaaagagcctaggggccaggcgccaaacgcaccttttctgtcccaattaaacaggtgattgcatcctgaggactccccaagaggcctccccgagagtaccacagctaggccttctagagcccaggagctttggttctctgcgatcccgcacacccgcaggctgagaggccctgccccgctcccttccccctccggagggttcttcagtaagggcccaccactcccaccctgtcagcgtctgcctgcaccagtttcagctcctggtctcccccactcggcattctttagtaaattctttccaggtaccgtcttgcacccaagcgagttcaatgtcctccgttccgtcaagtttgggtttgagctttgggctcagctgccgtggtctggagacctcgtaggcactctgcaagatgcctcgttctgctgcatgcttggggaggaagttgagctgggtgctggaagttctgaacccagcatgccccgggccggaggagatttgcttggtgtctccttagcgtcccgaacaccgcgcgcccctgctggggtaacctgaacagctggacccctcaactcgatctttattatcagcattggggctccagattccgtacacatctctagctctattcattcttcctaggttgagaacggacgcattgggagtcctacgcccgggggaaaggcaggagaggggaggaagagaacctgtgcccctggaagctagaggagagcctcgctctctctgctgctctgggttccgcaacgaattgagttcgggttcaggcggctggagcgggcgcggggaggctgaacaatcgccggaggcccaggaggggaggcgaatgtacacaggctaagtggccccactccaggacaagtggccctctaagtcggctcagtgtttacctgtttactttcccaggtagctcaaacacgagcgccttttctgcgctccagggcacgggggccgcccagaggcaccctgctttcccggcttctgccctcccacgcctcagctttacgccccctgttgtgggggtgcgctctaaacaacagcaaaccaggcaagaaaggaagatacaggagagcaggcgaggcctcggcacaccctacggaggggagcctttcttgtgcctgtggaagaagtgggctccgtggacggcatccgaccctccccccatccctgttctgggcacctctttggagacggcgctcgcatccttccccgttcaagccggtggtgaaagcttgcagtgcaggtacctgccccctgtcctcctggggagtaaagggcagagaaagtcttcgggggtaggggtggggtcttggggcctgctctaaagagggggcgaccttgaggagcccaaagcttcagcagccctaggcggcacacctcacactccccacccacaaaagcgcttccaatcattaaacacacaaggtcttttccctttatttggaaacactaatttgtttgacttcatttcatttcttcgtcttttttttggaatgaaaaagggttgaaaagaaactcctttcctggtacagtatgtggctgagctctcaggccctcgcacatcccatctcagataacaaccttcaagtggattagtttattgtctggttagcgccaaggtgcaagcgtttgtcttcattcactccggaaacaaagcgcgttgcaccttcctgctccagcaaggattaacggcgcggacacaaaggttttgtcggagggggaaggtttattttatcttgggttggagactcagagcgtggcatgcacttgaaatcaatggggaaggaaaatgtcacccaatctggtccctgagtgtggcgataaagacgttcaccttaaggatggcatctccaaaacagccccactttggcttcgacttccaatgcgggagcaggggctgcaggaagcagaggtgtcagctctcacgtcctggatgaaagaaataggggaatgcaccccaggagtactaccccgtgctgggacctttgctaaccagaaaatgaaaatccatcccagctccaattgccctcaccttctgcccccggagaaggaaacagggtcataggaaatcccttctgtctgtggggtggcagagtggagtctctgggttggggaggcctaaagctgtgtgagtctgcaactttggagaggccagaccgtgcccggcagatctctggcaggagagactcacagccattggacaggtggacgagaaagtgggcattagtgtgaaaagaaaggaaatctcagcctgctttgggttcaagcctaaggtgagtttttttttttcctttggtccatattatattaactctttaaattgccccaggaagggaagaatgagtggatgcctcccagatggacaatcctcccaagtcaactaagaaggagttgggtagataagttctccaggcccagagactttcagattctgtgtctgggggaaaatccccaccccgttcctacagagtggcgggaaccccattgatgccacggagagaactgatcctgggacctagagcctggagtccccctgcgattaactgtggatgcaggaggaaggcatctaggtgagctcccttctccctattctttttcaaggcaaaatatacaacactttcccaattatctgcctccctcccaccacaaaaggggcacatatctcccaaggatgtaaatagtaatagaaattagtatttgtctttctattaatcagcttcattgtgtgggcataagaccctgcgggcatatgttaggactttgataaatgcactttaatgagatctttaaaaatgcatccaataaaataaaaggcgaggaaagccgtttaactttcatggatgttaaattgaacacgaactgtggctccgggcacgctacaaaatggaaccggcctctctccaatattttctttaaaaacctagctttaagcccccctcgggccaaacgagcctgtcccagccaatccattatcaccggtttattggggaaccaaacgccacgtccccctgggcgaactccttggctttattcgttcgcgctgctctaatgactaaatatgttacaatgagattacgcatcgtcagtgttgccttcaggaacgttctttcagccaagcccgaccttccccggatgagggcgatttcaatacgggagatctgggtttctccaggaaacacgcgctgaaagcactctcttatctgaatttacttcttaacacgtgacaaaatcattaccacaagactttggaaaacaagcggctctcctaacgggttgcattcagcacttaaagctgggtcgggcaggctgatgtgaaaagtagttgtcggtggcgcggagaaggcacgctcttagctggagctaagggctggttccgggaaggacagggaatgcacccttgggccctcgggcacagagagggggttcctagggctctgtctctctctctccaatgtgagccccagaggttcacaaccttcccctagacgcaacgtcccctttccacccccaagagccactaaagtcgagaaggcgccagaggagctccaaagggcctcctggtagtgtgtgcgtgtgtgttgtgggaggaggttggggcggagggggcgcccctcggagacaaggaccccaccgaggttcatttctgatcctctggcgatctctactgacacaaacgagaactgtccggcgccgggcgcggcccaggcgacactcgcctcccaaactccagtcttcagtcgcctctccagagacctcagtccactgcgcgggccctcagccccggctcctcctgtctgcgactcccaccacttgccctcgtgctcatcaccaccgtcccctcacgtcccagttccgtctgaggagaagcccctgtctccactgggcgccatctccaaattaccttcgggacttctgcctctgtttcaatccccgatcccgagctccctgcgacgcacagggggcgacttacccggtggaggtgggtgcagcggccgccccttcctcaccgcggccccgccagccgaggcgcaaccggccccgggcaatcgggagggagctagccaggcgctccgcgcgcccgctccgccttctactcccggagctgcggcgacagccccgccgcatttcaaggcgcgtctttatctagtactccacctacccggacccccctcgctctgcgcccttcccccaccgcgcgccctaccaggcggggctcaggggaccgcaggcggggaccgccgcgggtgccgcgcccctccctcctcctccgcctcccagccccgcaccttcccagcccctgggacagtcccgctttccctgaccgcaccggaaagtgcgcagcggcgggatcacctggcctcggcggctggtaaaacttttcctgactgcaggcgcgacagaggggccctgcccgtcctcgagtgctcgccactcctgccgtgatccgcaaagtcggggagaacttcggaggcccgcacttgcccacctgctgcgtccggactacgcggcttggggatcgagccgagtcaggacccgggagagcgaggggctcataaccggggtccgccgtgaacccgagctccggcgccgctcggcggcgacgacggtgccccgagacccctctctgctggcaggccgcggtgaccgtgcccggagcgcgttcccgcgccgggcggctgtggcaggaggaccagacagtcagcgcctggcagcgagggcgacgccgggcttcctccatcgccaccgccgggctccgctgcggctcccgggctccgccgggtgccccgcgccatccccatcccgcgttcaccggaaacgcgtgcgagctggaggctcacctggagcgcgactgcgccgctggagcctcggctgggcgagcgcgcaggtcccggccgctctttatcccgagtcgcgggcggctgcggagtcgcgggcggtcgggcggcggctcgacgcggccggcgagcgctccccctcccggctccgggctcctggctccaggctcccggcccagcggccccaccctcctagctccggccccgcggccaccgcgcagccccagcggagggggcagctcccccgcgccgcgcgcgctctgtttgttttccttgccggactgacgtgagtcaaaatattggccatatgttcagcggtaataaattgggtatgagcgcaaacacacttgggcttcgatggctctttcagctgccacatggtaggctttgcggggagggggcttccaccccgcctcggccccctgcccccaaacgcgcgggtagattccctccctcctgcgcccctctgagcaggagatctgggaccccaggtttctcctgaccctcgcccctcctccgtccccagcagtgccttggactccgcagctcctggcgagcccggactgctggttaacaaggtcgccatctataaattgctcggtcgctaagacgccataaaaccaaagggccagatgtggcacgttatttatgtgtgaaaccgcgtttacactagatacgcggatccaaggccgatagcacgacttcgcgggaggtcacagacctctcgccccggctccaggctcctcccccagcacgatctcctctccaggttgaggggtgtcggtcttgccgggaaagggattcacccctgcagcccaggaggaaagtgatttcagtgcgcttgtgccaaaatgccacctgtccaggattaaaggcagtctctggggtttatttccgtagctttcctctttcccctgctcttggcttccttttattacgggcccctgggaggctgttttattttccaggcagttgatacgtttcatgggacctagatctgacacagcaagggtagtgtgctagagatgcccaactctgtgggtgggcgggatttgagggtggggtctcctgagccctgagggaaggattttgggaagcggagcagttcacctggctgagggagcacctgaaattattcttgcctcgggcggtggtcgactccagtgtcgcatgtcacctgccttatttaacttgaggggcagccggagcactgggagaggcagccctggcctcggaatatggaatccggtggccctgggtgctgcaggaaagggaagtaaatactctgttctaatagaaaacaatcgttttgctttccttcttcagaaggcggccttaggactgcatgtccccaaactggtcacctcgcactttactcacatgaattcattaacagtcattgtctctccattgccattattttactatttcttgaagtgaaccaaattctctctgtggttaataagcactgagccaggccccctaccttccttttcatcttcaaaacacctggggttccctgaatggcatcttccgtctggccaaggaaaataagagatgaaaaatgttgccctactgcagggaaaaacataagcatttcactttactattaccagttaccccaggtctgtgttcactagataactgtccttaggtggctgttaagggtggaaaaatgatgctgttgaaagagggtgggagagaaggggagaaccaacatgagctgggggtggggaggagagacccatttgataggggcaaaaagagctataaaatgaacctctgaacctgaagtgctgagcaggaacagtgactctctgggtttgctctcttgggctttagatgagctcctagaaagctttagttaactgcagaaaaacctgggactagcttcagggctacaggagtggttgatcttgggaaattacactgtttttcactcttttttcttggatttttacatctttatttatggttaaaaaccaaactatagggtctatttttgggtttacattacctccaagtggaagcgctgagattacagatcaattgcttctttgggtgaaaatattgcttcatgaccaaaattagacaaggggatttgaaggcaggccttcacatttgtagtcttcgtgggaatgggtgtctttgtctcacaagtgccctgtgaagaagctcatgctttcttcctgcatgtaccacagatatgtgctaggcagaggattgagacgcagacaaggagcttagaaagtcagtgtctggtgctcccagggtggaaaactgagagacacgaagcaaagagtatatcaaggcaggctttacatcattccctagttaggaaaacccattttaaaccagcaaatgtagcagggcatctactagttaactgataataaaaatccatgacaaagaagatgcagtggggagcaagcataaatgaaatacgactgcttagatacaactcctgtttcttctctttggccttattcagcaatccggtgctaaacttcatacactacatcctccaacctcaacagattgcatgctgttcttagttccaccatcttttatgctattcttacttcagaaacattcctgtcctactcatggactcaaaattcactgacttttcacactggaaaaaccttcctccacgaagctccccgcagacgcaccatcagctacagttgttcccctctaggagtgatcagttctcacttgcaagtcaacacatagtcagcggaaataaatactctagtgtgttttgacttgaactaggatataatggaattgtcttgaaaagagttattcaaaggtcctctcatggagaagttctttgcttgttatagctgttggccctgctatgcagttgattcaactaaggaagctaagtgccttgctcacaccttaccttagcctcacgtgtggcctccagagaggcaccatggaggtgagagctgagacggagtctgaaggaagtaagtaccccaaccccagaccacaaagggctctcaggaagcaatgtacttctgcaaagatcccagtgcacaatggggagctgaagatgggcaatgcctctccgtgtgccctcagcaagtgaaagtttgaatgtgctctccagcagacttgatgctcttccttcagttccttcagcagcagagccagaaggcaagagtcatggtcttatgaggctcttgggctttcagaagccaagagtaataccagttccttcttatctcctgcagagaaccagagaactgggataacagacactgcaggacacagattgttttgttaaagagttggccacagccaaataatttggcaacatgtataaaatcttcaagaagcaacaatcaaattcatctagagacagaaaccagactagcagtggcctagacttgggagataggggctggggggctggggagtaagggctgaggggtgtgaggtttctttttggggtgagagaaatgctctgagattgattttggtgatgttgcacaaatctgtgaacacactaaaagccatattcagtagacattaaatgggtaaattaatgtacacattaaatgggtaaattgtatggtgtacgaattacatctcaataaaataaagctgtttaaaaagccaatgcatctcttgtttatgtgggctagaaggtgctgggatagaagctaggaggggagggaggcactgggggaagacaggtgatcctgaaagttgtcttccatcttcccaatttttattctgagtattttcaagcacacagaaaagttgaaagaatagtgaacatttgggtatcttccacctggattcaacatttgttagtattttgccacatatactttatcactctatataagtgtactttcattttgctgaactatttggaatgaagattgcagaaacttccccatggaatagttcagcaggcatctcctaacaatacaattcttcaatataatcacgacaccattaccacaccttaaaaattaacaatagttacataatactgtgtgatattaattctttatttacatttctcacattttaccaaaaacaaaatgtatttttatagccagtctattttttccatatccaggacttattcaaggctcatgtactgtatttggtttacaaaatattttaatgtccttatgctcttttgatttacaacagtcttccttatcttactccctccctcctttccttcctccctccctgacattgactttttagaacccaaggcatttttagaacaccctacattctggatttgccagattgctttctcctggtgttatctgccttgttcttctacccctgcataactggaaactggatgccagatctggagtcatgatgaggcatatgctacacatttgtgggaagaatgccacaaggtagtgtgtcacattgcatctcattaggaggcaaatcatgttcttctattagacaggctaagtttgatcacttggttaaggtggtgaccaccaaatcatctcatgtgaattagtaagtgattgagaagtcactgagggataagtgacctttggcattgtttcaatattctttgtcactgagtaaatatccccatattctccaacaacttttcacctagaggcttgtagcattcattgtctgaattctcccgtttttttctacatgtacttggtttttctcctccatttccatttcttttaattttgttttcccttgtagtgttttccttctcttcagtccattctactggtggcaatgagggacactatttatctcagctgctggcattcaagactaaataaatgattgactcaggcatcctgttattgctttccagtaaaaagatgcagcagaagactagaggtttgcagtggaaaatcatgtcactttccagtaatattggtttagagaagtattaaatttgacacgtaaatctgatcctttggtttttggttggagggtttgtatttgtgatgtatttatcttacagatgcaaagcccctagattggaacaggactgaattgcactgagtcctgtggttagaagggctccaggctcaaggcagtctagagggtggggcagttgtctcatcacagtgggttcaccataggttagctccttctctcttgcactgcatggatcacagtcagtgccccctcctttttctttgtccttcctccctttgggggttatgagtaccccactgagaaagggaatgtcaaggcagggcatattgctctggcaggtacaacatggagaataaataatgagcctaggtttttcctcgaaggcatcatgcaaatgtaaatattggaagtaaaacacttagaaaaagatgtgcagagagagtggattggcatttcatggaattattctggattcatggtcgccgactctctgacatgtctaacatgttaggagtgggagagcgaaggcaggaaattatacttagttatacttttcccatcctgaacagctttccataggtgatgcacaatgcatcggctgaattacaaggtttgcttttgagccctctagggttttctttgagaagttaatatttacctgaccctggtgagtttacacgctttgggtgatcttttgggaaaaaaggtatcatggctgatatctcaataaagtaaaagataaggcctggtcaattacagcagcaggggaagaaaaaattacatttagacccaatcacaaaattgtcatctagattatggttgtcaaattttaactggtgttgatgttctgttgtggatagaaacaactcatcataaatctcagcgattctttgacagttttcaatttcaatgggaagcaccatggaagtgaacttgataaaggacttggcaatgaggaaaagtttcctttttttttcctcttgtcaatttagagctcatctgagaatttagaaatcttcttgggtttaacatttaaaattgtttgcagatcaactttttatattgtaaggatttcacttcagagaaaatggcatggccattctgcctgccacagagggaatgaaatgactctagacttgttctaaaatgattgaattgatacattaacaagcgaactgtttttacgtaaacggtgtgtttactggacgtatttttttgctgggggtgcagtaacaagtaccacaaactgggtggcttaaaaagcagaatcttataatctcccatttctggaggccagaagtccaaagtcaaggggttggcagcatggttccctctgagggtagtgaaggaagggtctgtttgggtcctctctccttgccttgtagatgaccatcttctctctgtatctctacccatctgtccatgcttctaaagtttctctttttacaaggatgccagtcatattggaattaggcaccaccctaatgacttaaatttaacttgattatgtttgtaaagaccctatattcaaattaagtcatattctgaggtactgcagattaggactccaacatacctctttctggacaggagggggcacaatttaacccatgacactttggatgagtttagggtggggatgatgaagatcacagaaggcccaaaggctccaagccatcgtaccctcgtgatgccaaaatttagtccaattctagtgcctgcctctgagtacaaacgccttgggtttgggtgttcagtgcggtggcgggcctctgggatttgatggtatatgacttttaagcagatgaaaataatttgggatagcaatcccattaggaaagtgggcatatatgtattaaataaaaaagacaagaaagtttcctggatctgtttttcctgccagtgaaacaatgatgaacttggcctatttgagctctgcctactatggccctttcacatctttttttttcaccaaacatacttcctttggatattacaatatccaactgtacgtctctgatagacatctaattctcgctgaattaatgggagattttaggcttaataataacttccagtgaatataaagatgtaattataaggcctctgtctttatatgactcaagacttttaggagctcacagcataccaagcatggcctcattactgtaatcctcttaacatcacttggaccccagttacaagtatcactacctccaccttaggggaggaaaacccaaggaacaggacagcaaggtctattgtctgatgcttcaaagacggacagacagggccccactgttcctttattatattctttattctggagagttctccattgagctagattgtcttccaaagctatccttgttctccattttagcttccccagttgctgtttgcgtatgctagctggtatctggggcaggagcagttctggatgaattgagaagaaaaacgacaaaacttctattataacgcactgtttattattggatcaatatgatcgatgaccacctgtcagatctgtaacattatctgggaaccagcagatggagctgttacagatagcattcagaggtttgtttattctcctgagcacgtgtttccatcctgggggaaataccacttcattgttacaacagtggagttgtctgtggccagatgttgagcacaccttttctcttggtccacgtctgcagaactggaaggtcatttgtatgcagggccaaggtttttacttggaaaaggtaggatgacaatcttctacctctcacaggcccttatggcagaaacagatgatttctgtgaacaaggagaaaattagatgtattgtttttccagaaaccgcacacttcgaatcacagaagtgtttacatagggcaggctggaggggacgagagagaccttggttgatggtgactcagttcataaacacagcatcaatattgatagactccaaaagatgcatatgcaggacatctctcgggatttgcagggaccgactgttcaggtgaacatcccgtactgttcgttcgagcaggacacggcagatgcttctttcttgttttatggagggtggtggtggattactcttcccatcttgtgcttttgaggatgctccaaaaactttaaaaatttatccatgttccctttcacacagtgggtgtttctttcctcaggcagaaggaaaacttaccaatggtttttgaatatgataggaaagaccacctgcagggagagagtgggacccctgctctctgcctctggtgaggtcagaaggaaaggaaacgtgggggccatacggaggtggaggtaacaaactgttccgacagccaaggttgataagtgttcaaaagtgtgcccaaggccttttcctctcctgtggttaatactgaattggaaaatagtgtctgaagaatctcagatgatgtaaatgtgggatgaagaggtggggtgggagaccttgtgtgatggtttctgaattatgagtctttaaaacctacctgcagccaggcgcggcggctcacacctgtaatctcagcactttgggaggccaaggtgggtggatcgcctgaggtcaggagttcaagaccaggctggccaacatggtgaaaccccatctctacaaaaatacaaaaattagccgggcatgatggtgggtgcctgtaatcccagctactcgggaggctgatgtgggagaatcgcttgaatatgggaggcggtgtttgcagtaaggcgggatttcacccttgcactccagcgccttccagtctgggtgactgagtgagactctgtctgaaaaacaaacaaacaaacaaacaaacaaacaaacacttgctattttccctgagggaagatggtatgaagctcattagtatcaactacttcctaaaatgttttgaggtaaaaaaaaaaaagttttctttctttaaccaaaactacaaatcattagtgagattttgggttaaatgtttattttattcccttctagctgacatcattttaagagtaaaaatttaaactacaataagagcttgaagagtgggatttttatgtgtaaaacacttaaaatttaatttagagctaatataattgttttgttttaatctgctgttggaagtatttctagaatgtatctgtccacaattcttccaatgtgattaaagtattctaaagataattgagcattttaagaggatcttgtgatttctggagttattgcacaatttctgaagacaagaagagtgtgggtgattagactgggtcctaatgctagagaatgacctggatttttccttttggggtgggagaagtagatgctttatccctggtatgagcaagtttattctaatgagggactttcacctttctctaacaggtagcatgtcaaaaattggttggggttctgattagttaattcctagttaattaaagctctggtatttagaatataacttcccagagggtcttaggaggaaagttcattttttctgtttaggtttctaaagatttgtttatttattataactttttttcacaacaaatagaaatgaagtgctttgcaggagaattctaatttgcatagaaccttatgtggatagcactgggtctatgtgtacacacatgcaatgtacatatattcatgtacacacacaaacatatacatataatattatcatacagtatgcattgctctgtctgcctttttttcacttatcaatgtattttgaagatctctgcaggtctctaatcctttttaatggctgcataatattccacagtatcaatgcatcacaatttctttaacttacctcctaatggacattaagttgtttccaagtttaactccaattaatactgcaccaaaacaatcctcgaatgtactaacctttgaacccataagagagtatttatttagtttcctagaagaatttctggattaagaggctgaatttaacacttttctacatagtgccaacctaaggcattagtctatgtgtctacctgctggtccataacgtagttcctggagaaagtggatcttaaaagagatgaataattaaatctgcaagagtttcaaatatctcttcatagcattccaaaatataactcccttctctacttcccataaccatgccaatcagtctccttacttgcagaagaggaaggtagttgctgtctactttctatacttcttggcacttgtcctacaacaaccagtcgtatcatatttttatgctagtaactttcactgcccttgcaaagtcatttctttgagttgtcctgaaaagaacaggatctcaaggtgggtcgtggtgggcaaggatcccaccaggcttaaactgaggtgacaacaggattttccagtggtggggatcctctggaccatggggaaggcatgcaagcggcactgggaatggacaagagcagggctggagcacataaagtggacctgagacggtggcactgggctttatgtgtgctatgggaaacagagaagaacctaagggagagggtgtttatttgaaagcggtgagtttggaaaatgatattgaggaaataagcaggctgaatagaaggcacccgaaaaagaatgccaggagagaaagtgagcgacaacaccaggggacaagacaatggtaattccataattaggtatgatctgagatcaatatggtctgtttgctttgtgttcacttgtccttcattcaattgctgctctttggtgttatttcttgccacgcttttcaatactttatgtggcatgtgcagtgcagtgtgtgtgtgtgtgtgtgtgtgtgtgtgtgtgtgtgtgtgtacgtgtgcattttccttgagggatattttaatgcatgatttgtgagtaagtttggattctcaaaacgtggcaatgccaaaacagagagaagaagttgctcattgccaactctgaggtgcagtggcagttctcttcaacaggggcctgttttccagaatccaaagaagggtataagtacagcatcttgcaagtcatgcagcaaaacaggtaagagatggcccctctttccccttgtgttgaaatgttggtaatgctattttttgacatgaacaatatagatatattgcggaggagaacacagaatttacgtcaatttttatgataaaacatgagtggccaaggaaatttcaaacctgctgctggttgcttcaggctgtactactcaaataaaccaaaacatttcttttcatatactttgaactctgatttcatcgtcttttccatctggactgttaggcggggacgaccagactctctttctttaatagtctatgtaatcattgaagggcctatctttgttattttaaaatgaggatctgtgcatgttttatgaaattcatcctatcccacttcagttcatcagctggcccagataggttactttaaagaaaaccgggagaagaccagccagcctgagaaccttggagaagtgttggctttcaaatggtttctgaagttaggcagatgtttactctctgtcatggtttgaatgctcgcccctctaaaactcatgttgaaatttaattgtcaatgtaacggtataaggaagtggggttttaaaacatgattaggccatgagggctccactctcttgggtgggcttactgcctttacaaagaggctttggagagtaggctgtctctcttctcaccctctagccttcctccatattatgacacagcaagaaggttctcgctggataccagcacctagatcttagattttccagcctccagaactgtgagaaaatgattttctcttctttgtaaattatccagtctgtggtattctgttctagcagcacaaaagggactaagacacgctcattcctgcttgttactacagcatggctcctacgaagagcgccaaaacctgcagggaagttgtgctttggatgaacctcttacttcttgggcatggaagtcctttcaccaagaacagagacagcccttgccaaatctaaactcaccgggcctatgttatttcaggtgaaaacactgtgtttgttccaggcacaaacacatacaggtgactcatcaggttctaagatggaacataatgacacaagagtaccaggcacaaaaccatgctctcaagccactcagaaggcactttagatgatgaaaaccaaacagaagctgagtgaccaacctccccacccccatcacactcagcaggctgagcagagtcacagaacacacacacctgggtggaacagatggcaccccggtgctattgttattttacagtctggctgaatggcaagctgaactgtcaaggacaatatgtagactattgcagttaaacaggggattgtgtctcccaagaaaggattccaccatctcggtggagttaagtatagcttctccacacaggggaagtgaggacagctgagattttccaggagaagtgatttagattatataaagacccttaatgaattatttccaggcattgtctgcagtgtcatattgcttgagctttccgttagcagcttcctggaaaagaacttctgcttgtctgggtcttgagtttctgttgcttacagcagccagagttgccatctgtgcacatatagagcatatattttaaattttgacatttccaaaatatgactgttttgtaaaattatttggataaaatatgtctgatgggaaagcacacagcctgtgtgtgagaacttgggaagcaaactgacgagaggctcctggcaggttgtattaattcttaacatgcaaaacagccacatgttggaagctaatactggagcaaggctgaaatctattattatttcagagtattagcattgtttggtgtagaataacttaaccgtaatgacacattgagaaatcaatatgacacgagagccagtgcgcattttcttaaagatgaactggctgatggttttagcaatgttttaacagaaggaataagcaaatttcaaaagtaaatgaatccgaagctgataagcaagtaatacatttgtagtacatgaatgattttgtttgagtttgcgattatcaccatattgctctagaaatatatagtacggccttttactttgtgttccaattactccacatgtcctatagttgtatgcattttatatatttgtcattcataagcaaggaactcaaattttctgttcttaaaaaacactcaatttagtattgtttgacaggatggtatgaaaagttgaagatggagagaaaaaaggctggattgtaattttagtgaccaaaagagaaaataatatcctcctctaagattccttactctattttgtcaaagtggaagtaacttaactttttgctgctaattataagaaaattaaattcttgttaaaagtaatttgagtagtacagaagtataaagtgaaaggtgaaggtatctctgtaatcccaccccaccgagattacaactgttaacagtttgatatgtgtatttcttgatttctaaatgcataggtataagcaaatatgtataaataaaacaattgaggttatttggaatccactgctccataagctgctttttcatttgactggatctctaggacacctttccatgtcagtaaatatagatctaacatttaaaaagatgctccataatttatttcactagtctaccgacaggtatttagttggtttcaaatttttcacttttataatcaatgttgcaggcattattttgtacatatcttagagtatagtttttcaattatattcttagaatgaattatcacaagtactgttgcagcttttttttctcctaaatttttaagcaaaatacctaagttttagggtataagcccctctcattatctacaaagtgatttattatccacagtgagactgaattcctggctgaatttctcctgttaccagcagtcatgggagatggaattctaagggggcccctgaggttccagccctcttgtgtacacaccgctatgaacccttcccttctgcaaatatgacaggatatcacttttgtgactgggttacttaccagttaactttgagttaatcacaggggatattatctaggtgggtctgacctggtcatgggagccattttgaagagggtaaaacatccagggtgacctggtgcttgccaggaaggaagcaaacagccactttgggaattacctaagggcctaatggccgggaaccagagcaccgctttgaaggtgagatgagtccctggccagagacctgtgtcctacaaccacagggaaatggattccatcaacaactcgtgagcttgggtgagaacactgagcctcatacgaggtaacagccccaaccgacatcgtgaagtccctgagcagagcactcccattaacctgtaccgaggctaagtttgccttggttaagttcctaacttagtggtaatttatcacacagcaatagaaaataaatgtgacagcaaacacaggcagggtacttccagcatgttctggattttctccagctatcatacctggggaagtgaacccttccctagcacctatcctacagagaatgtggtagccagctctaggggtgagcctgaggctccatggccatagccttctttctagacaccatagtcttgccctcaggaggatttctccatataagaatccaactttgccttctcagttcttagaacttaggtcagctaactaaaaggcctttcttagtgacttttgtaactttagcagttttaaattatttaattgactttaccttttctcaagagataaataactaattaatactggtatggtctattgattcttattttattacaaggattatgacctactaccatcttatcattttgatgctcaggtggtcctgggtttttccagagggtgctccattaagccagccccagtgtccttctggcccatctcattattttttgagcacttctttatgtgttctggcacaacaatgtattctaggcttatctggtactttccatggatcctttcctttctctagacttatctggtactttccatggatctcctctcctctcctctcctctcctgtcctctcccctcccctcccctcccctcccctcccctcccttcccctcccctcctctttctctttctttcttctctttctttctttctctctctctttctttctttcttttcttcctttctctatctctctttctttttcttttctctctttctttctttctttctttctttctttctttctctctctctctctctctctctcttattttgtttgaggaagggtcttactctgtcacccaggctggagtacactggtgcaatcatagctcacagcaacctggacctcctgagcttaagtgacctcccaccccagcctcctgagtagctgggaccacaggtacacaccaccatgcctggccaaattcactatttctaattcccttttttaatggtgggaaacctggctctgattatttattcatttgctcaatcccacataatatagaaaaagcttcagtgttgcaaacacataccgttgagataaacaaacattctaattgaagttcaatatctatttagttctttttggttttaaactgaggagaaatagagtactgcattcaaaattacttggaataggtttttttaattaattaaacatttttttcttttctccagtatggatatgttactcatctgaagtaatattagattcatttgtttctgtttggtttatcctattttaattttcttttcttttttttttgaaacagagtcttgctctgtcgcccaggctggagtgcagtggcgcaatctcggctcactgcaagctccgcctcccaggttcacgccattcttctgcctcagcctccggagtagctgggactacaggcacccgtcaccacgcccggctaattttttgtatttttagtagagacggggtttcaccgtgttagccgggatggtctcgatctcctgacctcgtgatctgcccgcctcagcttcccaaagtgccgggattacaggcgtgagccaccgcgactggcttaattttcttttttatccttttttaattacccattttattcttttttttttttcttaagagatggggtcttgctatgttgctcaggctgttctcaaactcctggcctcaagtgatcctcccacctcaacctcccaaagtctagaattacaggcatgagccacggcactcagcctttttttttccttactgagcaggaaatatctcaataagagtttatcttcagaagtcctttttgccccagaaactgagttttagatgcagggatcctcttgatcttaaatggcgtcctctagggaaaatgtggtggttctcagctgcttcagcgcaagctctccaagcccgtctactcagcatgaaaatctaggaggggtgagctgaagaactgtcctcatctccagcaaagtccttatagtggaaggacgcatccttgaatggatgacatctccttaccaaacacagtgccccagtgcatatacatggatgtagcatcaaagtacagacagcaagcaaaaaacacgaagagaaatgtgcacaacacaagtctgccaaatctctctcaatcatacaggttaaggggaacaaaaaaataagtatcctggattggaatatggattgaaaaaatattgctttggaggagaatattgggaaaactggtgaaatgtgaataaagataatattaaatatatttgatattatataatggcattgtatcagtattcaatttcctgaattaaatatttgctctttggtttacagagatggttcttgttcttaggagacacatggtagagaatctgggggtgaagggtcattatatctgcaacttactctcaaatggttcacacacacacacagacatatacacatccacacacatctacatatacacatacacacattcacatacatatatatacacacaatccacatatccacacatagacatccacacacgtgcacatccacatacacatattcacatccacacacacacacacctccacatatacacctctacatatacacacatccacatatacacatatacacattcacatacatctacatatatgcatacacacattcacatacatatacacatacgtgcacacagcacatatccacatccacacgtgtacacatccacatattcacatacatacatacacacatccatccacacacatccacatacatgcattcacatacatatatgtatgcaggcatccacatgtgtacatatacacacccatacattcacatccatatacatccacatatactcatctgcatatacacatgtacacaatacacatatccatacatacacattcacatacatacatgcgcacatacatgtatacacatacacacctgtacacacatacaaatggcaaagtgtgagtagctggtgaagcatatatggcggttcattgacattattcttataattttcctgtagttttgaatttcttcaaaataaaaagtaaaaatattgataagtaataagacagatcaattttacatatgacagaccagccacatcatgcatctatgttgaaatctctacacttttattcagacacccatgtcagagtcacaaaaaagggaccacattttaagctacaacaaaacttccataaatttcagaaagaaagtaaacagtttcattattaaacaagaaataatgaaaataaagggtattctattcaagaagttaagaaaacgatcaacaaaacatctaaataaagcagaagggtgggattaaagtagataaaaaatcagaaataagtgtatttgtaaacagaaaaacaatcatgctaaagaaaaaacccaagcactggttctttgaaataatcagtgatgtagataaactatcagtggtttaatttaaaaacacattgttatggagagttgtgcaaaacccactcatgtagttcaatctattaataaagcaatgaagaaaaattatactggaatctcaagagttgctcaaagtcacttaataaattgtaatgctcgatatgcggggggcccttcaggcctaagcttcattagctgtatgcaaaatccaccgaactttgcctctggatcccagggtcctgcggggacaattcaagtgtctgcctagcatagagttatgcttgccttagccgagggatgtgcaggagagagtggctgcgggaatctccacaggactcaaggcagtgtccaagagaaaatgtccagtgcatacctgccagacagaggggagcaactcctagctgagtaaggattgctgagtgcctggcctcttccccacatgccagtcatattcacccaggtgggttctggggaggaagcttggcccaaaacaatgaccaggaaatggaggaggaggtgggcatagacaggtggagagcagaggctacccacacttgtgcctgaaggggatatgaagacgaatatgagaaaggtggggagaagtctaactcttgactgagggaagcttttgataactaactggacaccctgatttatgacactgagactttggcttaaagtgtttgtaagacttctgcttcccaggaatgagctgaaaaatcagaggctctggtggagtttccatctgtggcaaggaaggattcccccgcactgagtaaagtgaacagggccagtgggagataaaagttaggtgtgttttgctgtcatccttctctcagtttatctctcttcttacattttactataaattgcaagaagagaccaaatgatatcttcagctcttttcttggaaatctctttagacaaacaggttcatcagaagcatattatgctttctatgtaactgcagatgacaactttgctaagctttctgccactacataacaaggatccctttcctctagcttctaagaacatgctccttacttccttttgagccctcactggcggcaccctcaaagtccagatttctactcaccagtctttagactttttctatgatgccactcaaaatccttcccgctgctgttcactgcctagttccagagccactcttacattttaatttgttatggaagcaccccactttcaggtaccagaatctatactagttatccattgcttcataaccaattatagtaaacttagcagcctaaaagagcacacatttatttcctcacagctttttgtcttttgtattgtattgtattgtattttatggagacagggtttcactttgttgcccaggctggtctgaatctcctgggctcaaacaatcctcctgcctcagcctcccaagtagctggtagtacaggcatgtgtcaccacatccagctaatttttttttgtaaagatagggagggtatttcgttgttgctcaggctggtcttgaacttctggtctcaagcaatcctcactcctcagcctcccaaagtgctggaattacaggcgtgagccaccatgcccagcctgttcacagtttttgaaggttggggattcaggcatggcctagctggattatctgttctagggtttctcacacagctgaatcaaagtgcagaccggggctggggtctcatctgaaggttctaccaggggagcttccacatcctggcacacagtaggattcagttccttctggattgttgaattgatggctccagctcctagctggctattggctggaggccactcacagttctcaccatgtgggcctcctcaacatggcaatttgcttcatcagaactgacaaggaaaagagtctactagcaaaacggagtcacagccttatgtaatctaatcatggaagaagcgtctcatcatctttgctatatcctgtaactttacaagataaagttttgtaactggcctctgatgaagagttgaagatgaattttgaaaatagtcttacttcaattggaataaaaatttaaagtgaatattataaatttattgaaattgtttaaagaagttcctaaaaaggtacctttgtcaacaggtttctctactgtgagtgttattcaagccaaactagaaatggtttagctgtatattatgccctgtgagcagaactgttgtcaatccaatctgggttatatatgttaacaagcgagaagaaggctcgtttgctgtattaaaaactttacatatttttctttagttctctttttggttatgcattgctatagaacaaactaccctcaagacttaatggcttaaatacaagaaccattttattatcttttttttttttgatacagggtctcagtctgttaccctagctagagtgcagtggtgcaatcatggcttatggctcactgcagcctcaacctcctgggctcaagcaatcctccgacctcagcctcctgagtaactggaactacaagtacatgccaccatgcctggttaatttttgtattttttgtagagacagggtcttgctatgttgcccaggctagtcttgaatgcctgggctcaagtgatcctcccaccttggccccgcaaagtgctgagattacaggcgtgagccaccatgcctggcccattttattatatctagtgattttttatgttaggatttcagacatggctcaacaggcaattctgctttacctggcattggctgggatccctgggtattattcagccagtggctactctggtctggagggtctaagacatttttgctcacctgcctggagccttggaggggatggctggaagactgggctgtaccccagatagaatcagggtttctctttgtggtccctccaacaaggtcactagattttctacttgatgttgtagggttccaagagaaaggaagtagaaattcccagcctcttgaggttcagctccagaaagtggtaaagcatgacttctcccacatttcattggtcaatgtggtcacagaacctgtccagattcaacgggaggggacacatccacctcccaggggaggactgttaaaggaggtattgcccagattaactgtcccacaattgtaactgctgagcagcaaaaagcttagagtgtaattgcaattgtatacgataattgcctatacacatcttctcaaaggagcatgtccagtttttacaattgtttttttcctcattatgttagttttgattatatttactgaaatgtatgttccctctgattaacctaaaaataaagtttgggcttatatttttaaaattttatttttctgataatttatttttgttgtattttacaaaagtgtgaatctgaggatgataaaaaatttagaaaaccctggttcttaccctcagatagtttgcatagtgctattatagaagataagagagttaaattaggaagcaatgtatacatgcttccccccttatcatggggctaccccccagcaaacccattgtaaagttgaaaagtcttaagtccaatgatcatatatcagagaccatctatactggatggactatctgatggattggaacaggagggcagtggggagggagccagaactcagcccctgctcctattcccaagcccagctgtctaggacctgggcgtccattcagaatagggataactgtttattctcacagacatgggatttgctcagcaaacctgcatggctgttccccagcagagtgagtgctttttccaaatcttcccagagagatggctatccatggtcaagccatgagctgtccagccagaggggcagccatctccagttggcatggaggcccatagatacttgtggccatgtgaatcagagtcctcatggtcatcataagtgggacatcagagaaaaagatattcagagtgtgttaggctgttcttgcattgatatattttataatgagcaattatagactgggtaacgtatacataaaaggtttaattggcccacagttctgcaggctttacaggaagcatggtgatggcatctgcttggcttctagggaggcctcaggaggcttacaatcatggcagaaggcaaagggggataaggcacttcacatggtgagagcaggggcaagagagagagtaggagggaggtgccacacactgctgaacaacaagatctcgggagaactcactcactatcgtgagaacagcaacaaggggatggtgctaatccatcgtccaatcacctcctcccaggccctgcctccagtactgggattataattcaacatgagattttggcagggacaaatatccaaaccatatcacagagttaaatgtaaaggcttgcatttggaaagccatacccaacagcacaaggttggaggagagatgacatggaaaagaggggctttagttgacagtaaggtcaatataggtcaagatgtctccccccaccaaattaacttaaaaaaagagagaatgtgttcttagattccggtcatggaaattcatatctggaacaaaggaagtgagagttccactgtattccaccctgctgagaaaatgtattcatccactcatcaattatgaatgagctatctcctggggtggatgctaggaatacagaaatgaaggatacgaggctagccccggggatgctgctctgtttctattaatcagaatttggtattccttcgtgggatacctgcagaggggttcagttctgatgttaccctttcatggggatgtggaaaattagagtgaatccctgaggacagaactgggatgtgaaggactcagatgatcacatatagatgatatgtaaaggaacggacgatgtttgatttagtgaataaaagagaggggactcttgttgctttttttatgtccaacacttatgaccaatctgaaagccactagccatatgggactatttaaagctaattaaaatacaataaaataaaaattcagtttcttagttgtagtagtcacattcccaatgatcaattgccgcaggtgcctaatactggaggcacagatgtggaatatttccatcgtcaccggaagttctattggaaagtgctggaaaaggcttccatgtgggagataatttattatctccatgctttatttagatgtgagggttgaaataatgatgatagatcactgaaaattagagcagaatagattttaactttgtattaggaaaaacttctgagcagacatagctgtccagagacgcctgcaggcagtaaatcccctgttactctaagaattcagctcagggtggcctgactgagatgctctgtatgattgctggggctggcctttctcccctggagtattctccgtggtgtggaagatgttctttatcacatgccttttctgttccaggggctcagctccatgccttccctgcacaatcacatttatcgtttcattgcaattctgcaagtcaggtaatattatccccccttttacagataaggaaactgagactcagccagataagttgttcaggttccggtaagtgcagtgattcaatggatccaggttgtcagattccaaagcttgtaactgggacaacttaattctgattttttaaaattatgctcagtaaatattagttgattgaacaaattgcctcaagcacatgttagtttctaaaaaaacaaacagtttttttgggtggcttatatctcaatgaaagtaaaaataaattatgtacagaagaaaggatattaataataaaacattaacatcagttaatagttcttggtagaattaaaggtttttttttcctatttgtcctttttttttaaattgttgtttactcagcaaaacaaacaaacaacttaagaatggaatatgggccctgagataacttagtgcctacacagagtatcagtcaactgttgctgcataagaatccacccccaaaacatagtgacttaaaacagcagaggtttattacttcttgtggtggtgtggattggctgggtgtttcctttgttggcttctccagggctttcctctgcggttgtatttagcttgaagcgggtgggactggaaggtttacatggcctcactcagtgctggcacttggaactgtcagttggggtaggctctccacgtggcccttgccctccaggagatttcacccacttccttacagagtagctttcaacatcatcaaagggtgttccaaggggcaaaggtgaaggttgtaagttcccttgcagcctaagctctggaccatgtcacgttctgtggctcaaagccagctgacttgagggatggggaaatagaattaactttttgatggggggagctgcaggacattacagctatgtttttaaaaaccttccatttattgtaaagcatgcatttaacctcacagaacagggcagagaatagtctagggattgtctcaaataccatcttgaaatgttggattaattttttggtggtctgtggataatttctttagaatgttcatagctgctattcatggtattcttacctctatatacatcctatttttggcctgtgatggctacaatataatcctgaacattcaaacacctaggcttttcccttttgaatgattacgctcaagtagaaataatagatggaaaccaatagtttttatccaagtgaaggcactctaaatgatattttcaggagggattgatgattgggagataaaagaaataaaaacatgatcaaggaagcaaacccaaatgtttaccaacagatgaatggataaagaagtgtggtatatagacacgtacaatgaaatatgattcagcctaaagaagaaacgaaattctgtcgcatgctgcaacatagatgaaccttgaggacattatgctaagtgaaatacatcagttactaaaagacaaatactgtatgactctgcttatacgagctacctagaatgacgaattcataaaaacagaaggtagaatgatggttgccaggggctggggagggagaatggggagctgttgttcagggggcacaaagtttcagctttgcaagatgaaagacctctggagatctgcacaataatgtagatatacttaaccctacaaaccgtacacttaaaaatggttaaaatggtaaatttttatgttttttttaagcacagttaaaaatttaaaaatgaaaaaaaacttgatcaagggcaaaaaaaaaaaaaaaaaaaaaaaagtagtgcattcattcagaggtcttatcccagagtacggttcccagccatggtctacttctgtgcctttagttctggaagccttgcttcccagtgagaacagaatcaggagaccctttgaaagaagaaagtaagaccgggagcagtggctcacgcctgtaatctaagcactttgggaggccgaggtgggtggatcataaggtcaagagatccagaccatcctggccaacatggagaaaccctgtctctactaaaaatacaaaaattagctgggtgtggtggcacacacctacagtcccagctactatggaggctgaggcaggagaatcgcttgaacccgggaggtggagggtgcagtgagccgagatcacgccactgcactccagcctggcgacagagtgagactccgtctcaaaaaaaaaaaaaaaaaaaaaaaaaggaggaaagtaaaggaaagtaaataatatctggagaagatagggttcctgtcttagaaaagcccaaatgcagcctgttggttggagcagttgagttagtaagccactccacagtgaccagaagacctgctttatgccatttgttttaactacgttgccgcgtaggcacccactcagctgagggccttaaatgccacctgcaataaaataaaaaccttacagttgccaaccatttcatctggttttgccctgagaatctgcaaatcctcttccattggtcagaagtttcacagctgaagagataggtaatattcttgatgaagtcagttcaagatcaagacaatggaaatttcttgcaacgactttcatcttctgtgtctattggtcgcataacttaagcgtgttggtatctctgttagtggtgaagtcggctgcaaaccacaaaacacctgactgctacggaagatattaacagggacttttttccttctgcataacaggaagtcttgagtaggtagtcgaggttgggtagaggacacttctgtttcaattctacatccctagggctttggaatatgaatgattcatgttgccttgtggtggctaaatggctaccgtcccctgtccctggaggcctcacaattcttttccaggtagggagaagggggagaagggtggagcacactaaatggcaaacaaatgtaccagctgagtctgtgtgttcatctggaatgcaaagcttttctggaagcctctcccagcagacatctcgctggcccaaaccagaaccctaccctatgaccactgctagctgcaaagtggctgggggacaagagggtatttttggagtgggcttgctcaggcaggtaacaaggctactgaagttagtcattaaaaccttcttttttttttttttagacagattctcactttgtcacccaggctggagtgcagtggtgtgatctctgctcactgcaacctctacctgctgggttcaagcaattgtcctgcctcagcctcccgagtagctgggattacaggcgcctgccaccatgcccggctagtttttttatttttagtagagacggggtttcaccatgtctgccaggctggtcttgaactcctgacctcaagtgatctaccctccttggcctcccaaagtgctgggattacaagtgtgagctaccacgccccgcccatcaaaaccttcttaaaggggcacacatccatataatgccccccaactccacacaccactgtctctccagcagtcacaagctggaaatggagctccacccttgtggcagggaatgcttgtgcataggcctctgaacagccagcctatgcctaccatccacgtcccaggtcctacttctaataacttcctttacaatgataaatcccttaaagatgggaaaattctcatatctcaatctatttgcaggtataccataccttgaattttgtttgtgcttaatatatatttgctgattttctgaagtgattgaattcttttcctctaaagacaattccagactgttccaggggtgaaccttgggaatggagaatgggagcacttcttagctggatcttaggaacattggagttttctaccagataacactgaatgacattatctttctgtaagttctctgttatggctggtgctttaagctcatgcctctccctccagcctccatctcttgctgggtctctgttggcaggtgtgtacccaggtacatccagtagctgagttggtgacagaaagaactgaaaaaacacaatctccagcctccacatgatgaaaatcacagggttgtttaaatagagggggctattaatatagatttgtccttttctccctccttctgcttaatcattgtcaggagggcggtagaaaatagtctgcacaccaacaaggctctggaataactaattgaatactataaacttccacccaggattacaaggagggacagttgcctctccagggtgctcattttgtttccggatcctggcacaggttggtcccaggctcctctgccggggcgactatgtccagggcctttgggaaccacgggctgatttgtatgttctcattgtaacagtttctgaagcctcaatttctgaggtcttccatggcacactataatttcaggattgacaatgatgctgacaagagtgaaaagaaaacatatttagggaaacaggaatttctctcaacctttattttgacattcagcagtagatgatggatgttttaaattactcttgataagaagctatcagtaggagttattttgtttcacagatacctggcaggtcaaaaacacactcaaattgaacaaatattctcaaattaagtacggggaatagtaaggccgagtagctcatgctgcagagaggaagcacatctaaagctacagtgagtgctcaagggagcaactcctacatcatttccacaagaagcaaagaagagacaatggctgggagtcagaatggaaattaggtgcttgctagtttaatctggagagctggaactgacttaaggaagaggtggagaaaacctaccacccgggctgtcgggaagctggggagcttggactgaaagaacacgttgtttcaaggactcttcattttcaaatgtctttcacaatttacttaatctctccgaggccttagtttcctcatctataaaatgggctggtaatatcctcattgttgctgtgagggccaaggaagtgatgcatatgaaactgctttgaaaactgtgatgtactcagctacgtgggagactgaggctggaggattgcttgagtccaggagtttgaggccaacccaggcaacactgagagaccctgtctcaaaaaacaacacaagaaaacaaaactgtgatgcatcatgcagctgcttttctttggataaataatatttgctaagtaaagatagtagatgttcctcctttgcaaaccattttcaacttctaacacagctattagaagttgtaagttacatatataaaatttatattatttgtaaataatattcattgtgcaaacatttactgagcacctctgtgtgccatgcactgtgcttggtggcagagatataaatccattgataattttctcactgtaaattcctacaagttctttctttctttttcttttctttctttcttttttttttttttttctgtgacagggtcttattctgtcacccaggctggagtgcagtggcacaatcatagctcaccgaagcctcaacctcctgggctcaagtgattctcttctctcagcacccgcaagtagctggactacagtaggggcatgcaaccatgccaagctaatttttgcattttttgtagatgtggttgtgccatgttgcccaggcttgtctcaaactcctgggctcaagccatttacccgccttggcctcctaaagtgctgggattataggcaggatccaccacgccgagcccctataagttatttctttaaaattattgggtttacatggaatactatgcagccataaaaaaatgaattcatgtcctttgcagggacatggatgaagctggaaaccatcatcctcagcaaactaacacaggaacagaaaaccaaacaccacgtgttctcactcataagtgagagttgaacaatgagaacacatggacacagggaggggaacatcacacaccggggcctgtcagggggtgagggcaaggggagggagagcattaggacaaatatgtaatgcatgcagggcttaaaacctagatgatgggttgatgggtgcagcaaaccaccatggcacatgtatacctatgtaacaaacctgcatgttcagcacatgtatcccagaacttagagtaaaataaaataaaataatttaaaagataaagttattgggttaaagtaagtgcaaattttaaagattttttatgtgtattaaccaaattgatttccaggaagagcttactctttcatagtttatgagaagtgttggtttttctgcccttttgacaacacagggcatcatttgaaatttttgtgctgtcctggtttattattttaattttcatttattttgttgttaatgcaactggatttttaaaaaatgtgcttaatgtattttactattataatcatattaaattagtgttttgtataaagcgcccacagcaaaaccaagcaaaaaagaatattgtcctgtctctttcttctacttgctggatcatgattctcatgagtggatgagaaggaagctgtgggctttggcaggtctagagagaagcttgaagtgacatctaggaaggagggtctcccttggagtcttggaggggccatcgagggctgagagagaccgtggtggggcagacagcactatccagcctcatccacagaggtggcattttccaggctctggctcctataaaggtgtgggtgacttctgaagctggatctatgggccaccccacaggaacaaatggtcatggttggaaattcagatgccttgggaagtaccagtgaaaacactgtctagtggctgtctgctactcctggttgcttgaaaaattttttttgtgtgtttggtagaatacatataaaatttcccatcttaaccattactaagggtacagtccagtgtcactaagcacatccatattgtgcaaccatcgccaccgtccatctccagaacctttcatcctccagaatggaaactctgtatgcattaaacaatcactccccattccctggtccatgcagcccctggcaaactccatgatatgaatggaggctctgtctctatgaatgtggccactctaggtacctcatataagtgggatcctacaggatttgtccttttgtcatgggcttatttcactaatgtgttcaaggttcatgcgtgttgtagcatgtgtcagaatttccttcctttttaaggctgaatcatattctgtttactcttgcagccccctttggggccttatgaggcttctatgttcatggaggtgccagcattatgctggggacccagcctaagatgaacccacctgggaaaacctcatggaactgagctgcagagccttcctcacggtcctccccctccatccctctcaggtccccaaaggagaccaggaggcctctcctgattcatctgaggagggtttggtgggctgggaagtgtccttccacttacttggagcttttcggcagccaaatctctatctttctccgtataataggttctctccctgtttttgcagggagttggtggtgggatttgtgacagtatggaaatagtaaagacaggcccaaagggtaaccatacaggaaaatatctattaccaggtgaaaattccccttttaaaaaaatgtgggctgggcacagtggctcacacctgtaatcccagcactttgagagactgaggtggaaggattgcttgagctcaggagttcaagactagcctgggcaacatagtgagacctcatctctataaaaaaaaatacaagaaattggctgggcatggcggcatgcacctgtcccacctactcaggaggctgaggtgggaggattgcttgagcccaggagctgtgattgtaccactgcattctagcctgggtaatcctgtctccaaaaaaaaaaaatgtgtagagtttgaacagttcacttttttttttttttttttgaaatggagtctcactctgtcactcgggctggagtgcagtggtgcaatcttggctcactgcaacctctgtctcctggggtcaagcaattctccagcctcagcctcccgagtagctgagattaccggcacccaccaccacacccagctaatttttgtatttttagtagagacagggtttcaccacgttggtcaggctgatctagaactcctgacctcaggagatccacctgagggattataggcttgagccaccaagcccgtccgcacacatttttttaaagaaagaaatttatgcacacctttttggaaaagcaggcaactgagatggaatggtcattctagtcctgtagaggatttaaaaatatgagagcacttttgccttctcctactctcatgaagctgaaatcgtttatttatataactcccacctttggcgtgaacttcaaattagacatagtgttatcaattaatgtaagagaaacccatccagagaggggagtgaggcagctataaaaccaggtggaattgaatgcttataaaagaggttcgacaatgtgatcttcatgtcctggactcctgggagattttccttgaactggttcacgtagtcaaaagccttacattcttttctgaaggacagttgagatcattttaatcataatggagactatatgccgtgaaagtctttaaaagaatgagagggagagtttgcacggtgaaggatatagagcaggctggctttgagcttacattagcatgcaccacctcttgtctggaagcaccgcgtaccctcactaagactcatgataactacgaaaagtgaagcgaggctggaagagaggccacggatgttaagcatgttaacatttccattacatctaaaagcagaaaatggaacaaataaagcaggttgggttttcttcccccagtataatatatgccagaatgtcacaagaactcattgtctgcagtgaatacaaaaatatgggcaattcaggctgaacaatggaaacgttggtgattccataaaagcatcccattcgcattaagttcatctggctttgttttatccctattttttcccccaataaagctgtgtcttgaataatatgatctttaaagtttaagctgcatatagaagtgcttcttcttttcctctccactttctctggttctgaaatgcaagaaatgcagaataaaagacaattgaaccatcgtatttgttttttctgccccttctctccagttaaatgctgttgtgattttgatgtaaacatcctagtaattttcacaggaagtgggtgcagggatcctagcagtgtgtctgttcaatggtactgttaggcgtctttttgttcaaaggaggacttgttccaacgccctggcactgatccagtgcaggcagcccggggacttggtgggccaccagggcaggtggtccaggagctggactgtgcacttagaggggaggctgggtggtcttttctttctactcgggatctcctgctcttagaagaccggccttttgggattgagtctttgaggactcagaagtgattttgaccttgagctgacattttcagagtgaacgagcttgctgaaaggatggcaatgtgcaatgtttggctctccccatgattacagagttgagtttaagagacagagggagtaaaagaagatgacatttgagtttttgtgagtcttcatcttattcctttctgcctctcgttggaactgactgccaattcagaacaaaacaaattgtgaaaactcccctcctgtgtcactcacccctggccctcggggcccagagttggaacaaattaggatggcttttgacattaggcacaggacataaagccacaaaaagtttgtctatccacaaagaagcagaacctttgggtagacccatacacccatacatatatctacacaaaacactgtgttttcaacccaacaagaaaatcatatttctcagttctgtttgacttcctcagccttgttttcttatccctgtttccttccttcctccctccctccctccctccctcccttccttccttccttccttccttccttccttccttcctgccttccttctctttgctgatccttctgagtcttgagccaggatacagggcaacactcaagactgtcctcatgccctttcctttcccctgtgatgacgactcccagacgtgtttctcaggcctgcagcttgagtgcacatgatgagctgaaggctggaaaagttgagaggccaaatcagttcagaaaatttattaatttaaattttttaatttaaaaaaggatttcatattttacccaaacagaaatgatcgatacccatgtacccgccagcttaatctgactgatgttaatatttcccctgtcttatcttcggatctctctctctctctctctctcacacacacacacacagacacacacactcacacacaaagtttttactattttactgcttgtgctcctaaactttagcttgtgttagaatcccctggagaatgtgtgaaaaggaaggttctgagttccaagtccaggaaattggattcaacaggatggtggtggtagggaggtgacccacatctactctttctcctggtggattgtaaaccttcaacgagtgttatcttttagtagtaattgtaacagtggctgcagcaatatatatttctgttttgtaaatcctttgtatcttgtagtaattttagacttacagaggggttgcaaaaacagtacagagagttctgtttattcctcacccagctcaccccactgttattgttttatgcaatcatagtgcaatggtcaaaaccaggaacttaccatggatgcaatactagtgactgaactccaggttttatctggattccctcagctcttctgctatgtccttttcctgttctcaggtggaagccaggaccccacattgcattcacagtcatgtctctgtagtgtcctcccatctgtgatggttcctccgtctttcttagcctttcatgaccttggcaatcttgaagagtactggtcagttattttgtagaaggtccctcaatctgggtctgttgcacatttgctttgtaacaagcacccgagtgcccctgacacaggctgtcctcagaccacgttttggaagcactgctttatacctggttttggatcaagctttttccaggttgatccccatatggttcataaacatcgaaattccaaaatataatccgtccccagatttgggagctcctcacctttggagataaccaaaagcatgtgttctaagccttgacatgttttgaacaattccagtgaactgtaccatgtaccatggctttctaaagtgactactttgcagagagagacactccttggaggcgtgacggaatgatagctttttaagggatggcagagggactggagagcttacttaattctatctctcttcattttacacagaagaaaactgaggcccgttataggggcatgatttgctcaaggtctcagaactggttgttggaagaaccagaaatagaaaccaggtttactcattttcagcctcgtgttctccacccctcatccaccccgattgttgtttataagcagtcgctgtatcacacccagcagcagtgatgagctcatacccttccctgggctggcccaaggacacaagcgggcacagggctgaggtggggctcctcatggaggtgggcggggggcatgctttgcagcctctgtcatcccccagtggcgccgctgctcttggccacacctgccatactcagctccgaccttgcagagcttgctgcatggccccacatttttaaacagagctttctcccaagttgcaggagcttttgttacccagcacagcggtgggggctgctcatggtgtgcagagtgactccaacaacgaggaaagtgaccgggtaagtgtggtagcctcctgacctgcgaatgaagaacccggaggatgtggaggctggttctacaaagtgcctcagggtgactgctgttcagatgaaccaaatcatcaatgcgcccttatctactcttcttcgtcacttttgcttcctgccaccccctcacaggggagctgcctgtcctgagcacaggaaccgcatcggagggaacccaagctaagccaggaggtgagtgcccgttgcctaaccgccaactgtggctgtgcaggaaggtgggcccagaggtgctaggtattttttttagggtggggtgcggtggtcaagtttactgaggtatgatttatcggtaggacaattcactctttttagtgtgcagttctgtgagttttcagcaaataaatacaatagttgtgtagccaccaccaaaatcaagatatagagcagttctggcactccccacaaaattccttcatgctcattttaagcaacaccctccccaccccagcccctggtggccattgacctgaagtttagccttttccagtaagtcatggaaatggaatcagacagtggacagtctttagagtctagcttcttttccactgcatgaggcatttgagattcactcatgttggtcataccagtcatgtgttctttttattactgagtggttttccaggacatgaatggaccagtgcttctcttcattcacctgttgaagaagatttgcgttattttggggtaattatgaataaacctgctatagacatttaggtgtgtatttttgtgtgaagataatttttcatttctctagggtaggggaggacatacagtaagtgcatgtttaactttataagaagctaccaggctgcttatggatgcaggttccagttgttctgtgccttcttcagcacttggtattgtcagctttactgattaagtcattccaagtggtatctcatcgtgattttaatttgcatttctctgatgactaatgatgttgagcatctttgtttgggcatattagcttcttgtatatctttctttggtaaagtgcctttttgaagtttttggacattaaaaaaaatgggtgcttgttttgatttttaatttttttcaagagattctggaaattgagatttttacacgaaatcctctgatttttaaaaataaaaaccagacgagtcgcgatggctcacacctgtaatcccagagctttgggaggccaaggagggcagatcgcttgaggccaggggtttgagccaagactgaccaacatggtgaaaccccatttctactgaaaatacaaaaattagcagggtgtggtggcacatgcctgtaatcccagctactcaggaggctgaggcaggagaatcgcttgaacctgggaggcggaggttgcagtgagctgagatcgcaccactgcactccagccagggcgacagaataagactctgtctcaaaaaaaaaaaattaaaaaaaaagaaaaattaaaatgagaaccaacttaagagatttagagagagcaggtggcttctccaagataatgaagcattgggttttcaatcccaattcttctgaatctaaacccagtgtgcctgctgctaccccagggatgttcacataaacaaatccagagcaaaatactgagcagaaaacccccacttgtggccacattctgtgagttctgctttatggtcataccggtatcccagagatgcctgaatctgaaacttgctcgctgaggggctgagacaattttactctcattaggatttacccagtaacgagtcgggtaaaggtctcactcagaaacagactagggtcaaattcgtagagacagaaggtagaacggtggttgccaagggctgagggagggagaaacggggagttgtttcactcatagagtttcagttttgcaaaatgaaaggagttgtggagatggatggtggtgatgactgcacaacaatgtgtgttaatgccctgggctgcatggttaagaatggttcagatgatcacttttatgttatatgtattttatcccaatttaaaaaaaataaaaaataacgacaaaaagaaatagactacaaagaaacaatgctgtttttcatcattctcacaccaattaatccccagagctgtcttctgattaaagaccaccactgtgtcttcatttcagggacagatgaaccccatcttgagacagcacctctggattttatgccatcctcatgagtgaccaaggtttctttagagcttttatgctcatgagttacattctgcatttggagtcgagggtacacacagtgctgcgctataaagacattaaatgcgagtctgctatcttttgaatgtcagagaatcccacataaacatggttaaagaaatagacgaaccctttaggaaaggggtctcaacaaagcactctgctctcctattcagtggggaggtgggtccaacggtggcgacaatgattttcatggatgtggttcaaggctgttctgagcagatgcgtcagattcacgagggactgcagcccctggtggggctgggttcaagcattccgagggccccgcctgaaatccacgctctcattatcaaggaaaccacgtgcatccctggtccttcttaagaatctgcgttcaaggtcgttatggatgctctgtgattgtgaaggctctttcaggcccacccttcccatgtgacgggatggtttcactgggtctcatgtgctcaaggtgagctgggtttgtataaccggcagtgactgttattcaccgggaaatgttcaaagccttagggccaaaacctgtttatctataacaaagggaaagtccccaagtcatctgggtagatcatcttaaaagagaggactcttctattttatagttttccaaatagtgagggataaacggtcaaacaggtaaactctctgtccctcagcaaaacaacacacaaacaagtgataaagccccccttgccagcatagggggactctttcagtgtttgcgggtgggtttaatctccctgggctgttatagaccttccttccattgcactcctagaggcttcaatgttataggatggcacttcttcatatttaatcacttctgtacagcttcctacatttttgctatattcacaaatcatttacatttactttgtaattttcattaaatcaattttaaaccaatttaaaaaatttacttagccgtagccagtggctttcaaagttgaacatgtatcagaatcacctggaggtcttgttcaatgacgtatggctggatctccccctcagggtgcagtaggtctggggaggggctgagaatttgcattttatcaatttttcaggtgattctgatgttgctaattagaaggctacagttcgacaaatacttttctaagcaatagcatcccaggaatcatggatttgatatggctttttaaaaagaggtgtgttggctgggggtggtggctcatgtttgtaattccagcctttgggaggccgaggtaaaagaatcacctgaggtcaggagttcaagaccagtctggccaacatgacaaaaccccgtctctactaaaaatacaaaaattagataggcatggttgtgggagcctgtaatcccagctactcaggaggctgaggcaggagaatcgcttgaacctgggaggcggagcttgcagtgagctgaattgcgccactgcactccagcctgggagacagagtgagaccctgtctcaaaaaaaaaaaaaagggtgtgttttttagattgcaattagaaacacggagacattgagaagtgggcaataataaagccacttttcatgaagtagtgagatcccctccctacagtgggtgtccttgtgaaggagaccagggtggcgctccctgctggctctcacccgccccctggcgtgggtgtgcctactgatagagccaagggctgatatcctatctggctctgtcgaaggcacaacttggggcaattccttacccctctttgtcccccagtcttcccatataagcagggaggtgatgacactgactgacatctaagggttctgttgctccatcctggggcctttttgaagatggttgcctgatggaggcagcctccagaagagaggctggaatccccctctgtggggtggcgggtgcactgtgatgtttcatgtatcagcactttctgaactgcacttgacaaaaacccacctcaaactggcttgagcaagaaaggaaacttattagctcatgccactgaaaaatgtatgtctggattcaggtttggctggatccagggaataaaagggtgccatctacttcgtctcacagtctcttttgctttcacctgcctgctccatcctcaggcaggttcctctcaggcaaaggtaaaacagtcaccagcagctccaggcctatgtcttgccaacttagcaccttttctcaagggtttcagcaaaagtctcagcactgactctcactggactatattatgcacccatcactgaacccattactcactggagcagacacagattctgtggattggccagacttgagtctggtttctgctcctgaagtggtgaggtatcacctacacctaagagttgaggaggcatggctctccaaagcatgttgtcaggagctattactagagaacaaaagtatgctgggaaggaaaaaacccacagtggtcctcccagattcatctgcatcagtggtgatcaaagtgtgttccctgaatctaaggggaagcatcaacatcacacgggagcttttagaaatgcgattcatggctgggtgtggtggctcacgcctgtaatcccaacagtttgggaggccaaggtaggaagatagcttgaggccagaagtttgagaccagcctgggcaacataacaagaccccatctctacaaaaatttttaaaattagctggtgtggtggcctgcatctgtggtcccagctacttgggaggctgaggcaggaggattttttgagcccaggtgttcgaggctggagtgagccatgattgtgccattacactctagcctgggagacagagtgagacattatctctaagaaaaaaaaaaaaggaacaagaaaaagaaatgcaattatcaggcccagctgtgcagtcactgatgtaaaccagaggctctcgaccgtgatttcaatttgaatcacctggggtatattacaccatctagactctactcccaaccaattttaccacggcagggaggggacggggatccagtcactggtgttttaaaaaaatgtttctccaaataattctcatggcagccaaggttgacagaaccactagcttaaacagactcttgttctctgctacttctcacttatgaaatggcagtaaataagactgtggacagtttttctgttgagaatggtggtgcattaaaagagctattactagacttgggagatggcaacttgagctgaggatgtgacggtttttagtttttttaatacacattaaaatcaatatagaactgattaaaatttcttctgagtaccagctaaagttaccttgtatgctattaagtatccctggtgtaggggcaggaacactggatttgaatccagaagacttgcagttgaaagccaagttcggtgatagcttggagaagccatgaaatctctctttatttgcatgatgggaaagatctcagacacctttaaaccccaaacagagaaacaggtggtggcttcagtggagatgatgagtggggtgaaggcagccattaaagacaagcacaaaaaccaaaaatacaaacaggcagtgggatggttagaataggattacagaatgtctgttgcttttttttcttttctttttttctggagacggggtttcactctgttgcccaggctggagtacagtggcacgatctcagctcactgcaacctcagcctcctgggttcaagcaatcctcctgcctcagcctcctgaatagctgggactacaggtgcacgccaacatgcccagctaatttttgtatttttagtaaagatggggtttcaccatgttggccatgctggtctcgaactcctgatatcaagtgatccacctgcctcagcctcacaaagtgccgggattacaggcatgagccacggtgcccgacccaccagaatatctgttgcttttgatgggctcagttttgtggagaattgtgaaagtctatgtggaggaaggatctcaggtggaaaagaggaagaaatgacattggcgagctggctaggactgagggtacatgatggagagagtatgcaggagttgactgaatccagaaaagttttggatttggcttaattcaggcaggaagtcagcccctgaagcagacgtgtgactaaacgaagtgtgaaatgcaggagaggctcagggcagagatgacattgggaacccaagaaaggggctggagagcccagatggcaggcagtggaggcctttcctgggtattcccactgggaaaaaaaaggaaggaaataagagactcaagcgactttgaggagagagcgactgttttagtgtggagatgctgaagaccagcatttcaagcttggggagctggatgggtgggaggtggcggggtcaatagaggggaacctgtggaatgagatgatctggggggaaacacctgtgcgaatggcaggggataatgtgtaagaaggacagggtgcttgtccctcagggactctggtctaatggagtctttccagggctgagtgccagaaaatagacccaggctctgccccaggtttccggccggctgcacttcaccatgtgccctgttggactctgacctcctgttctcacaccgagacattttagccatggtcagtgtttatttaagttacttccccttgagttcactggcacaaaacactgcccggtaggcaagtactgcctgtgccccatgaggtctgggacagtgcccgcgggtgtgcgtccaggggcatcaggagtgcaatgtccaggctctctgctccgtgcagaggctcctgcagagccagagcgctacgagggggaaggggaacgtctggtttacattttaattttaaagatactattcaaatgcggtaccgttttttcagatccgaactcaattttgcccgtttcatattaaattagtcatctcatagtttgcattctgttttgtcatttggaattttaaacacaaataaaaactccacgtggtcccatggagacagaactgaaataactcaaagtttgcatcttcacctctctaggcatcctgctatcattttttatttggaatccaccattcatggtgaatctgcagcatcccagggcttgtcttgtgattgcacctgaaggaaaggcagctcagacaacacagccatagaaacccacttttgaaacagcctgagtccacatgagtcaggtgccggctgtagaactgagaattctctgaattaacttctgaataggatgcaatgtttattaaaggatctgtaataaaaagatgctattttgaaacttacatttatttatataagattataacttatcagtaatcatcatgaattatttagacctttgatcaacaaaatattttttttctagagaggaggattttattcctgatctctttaagaattgctggaccatgataataaaaagcagaaaagttttatcaggattactattattgttaacttttctacagacaatgccccagtgacctgcccttggtagatcactgactcgcaaggtggttatgaggattaaatgaattaaaacaattaaagcacttagaagagggcttgatattagctattactgttttttctacaacacataaatcccactgctaaaagaatccacaggtatttgatgagggctgctcatgaatctcaaaaatccttacattaagaaggtggaaataggccaggcacagtggctcatgcctgtaatcccagcactttgggaggctgaggtgggtggatcacttgaagtcaggagttcaagaccagcctgaccaacatggtgaaatcccttctctactaaaaatacaaaattagccaggcgtggtggtgcacacctgtaatcccagctactcaggcatgagccaccgtgcctgggaagtttatttatttttattgtttgtatggtattgtattgtatgactatgcctccatttatttatccattctacagttcatgaacattggagttgttccagatctgggctaataggaacactatgttagttacctttccttggttactaacagggttgggcatccttcatatgtctgttggctatttggattcccttttttgaaacgcatatcagggttttgggggcccatttttctatgttttgtttattccttactgatttatagacattctttatgtagtttgagctctctgtcagttttatgttcccctaatattttctcccactctgtggcttgccttctcgctctcttaatgttgtctttcgattaacaaaattcttatatttaatgtactcgaatttatcagttttctttaaccttctaaaagcttttttttcttggtcttttcaacttggttttcacatatactccacctggaattgaattttgtatatggtttgaggtaggggcctcatttcatgttttccttgtggatactcaattgtcccagccacatacatttttaaaatagttttttctctatcctccttcaattttatctttgccataaatcaagtgtccatatatatctggatctctttaagaacactctatcctattccattaatctattatctgtccttgtacaaacactaggctgctttaattaatgtagtgttattttaagttgatactgggcagagcaaatccactctcttctttgttcttcaggaatagcttaaccacttttggtcttttcatttccatatacattttagaatctgcttgttgggatttcagttgggatcagtaaatctatacaccaagttcatgtaggattggtatttttatgacattgagcccttcagtgcatgaatatggtgttgcttctcatttatttaggtcttccttaataaaaatttacagttttctgcatagaggtctcgaaatgttttgttagatttattcctaggtacttgatattcctttcaacacaaatgtaaatgatatatttttcttttaaattaatattctagccatttgttactaacacagagaaatgtagtcgattgttgtgtaatgagtagccttgtaaaactcacagtttctaatatcttattctgtcagttttctatgtattcaatcattatcttcaaaataagaatacttttgctctttcctttttaaatctttgtgcattttagtatatttttcttgtcttactctattggctgaaacctctactctaaatgttgaagggaagtggttattatgggcatctttgtcctcatcatgatttccagaggaaagtatttaatatttcattattaagttagatgtttgctgaagatttattgtaggtaaacaatatcacattaataagtccccttctttttctagtttgttgatagtatttattttaaataataaatgaatgttacaccttatacttgatttttggatctgtgaaacaatcacgtttttgctttatattctcagtgtgatgaattatattgattgatttttttaacattaagtcagctttgtgtctttgagataaactaaatttagtaatgaagtatccttctatttcatatccctggattcagactgactttttctgttgtttagaatttttgcatctacggtcatacatgatattcatctgtcatctcccttccactacgaattaaggtttcaagtctacactagtctcaaaaatgagttgaagaatatactttcttccattttctgaaagacagtctaaaagattggagttatttctcacttaaatattttgtgaaatttatacatatgcaacttcattacctaaaaagggccatcttccaaattacattaaaatttacacaattacataaaatttcaattgtaataagttataatcatgtaaaattgcaaccacataattaaaaaatttaaaatgacaaatagataaaaatcacataaattacaattttataaaaactacataatacattacaaaattacatgacaaaaccttcctcaaaacaggctttggagtcagactgtctctgtatgaattttggcgctgaggacaggctgtgcaatcctgtgccaatctctttactcctctgacctctcaacgtccttatctaccatggtccctctacctccttcagatgtcaggaggagtaaatgaaacaatgatatgtaaatcaatttgccctgagcttggtctataaaaggtgtttaatatttggtaacaacgttcatgattatatgttaataatttattcactcaagtgtttattgagcatctattgtggggccaggcatgctggatactgggaaagcaacgggaggcaaaattggatgcggcctttcatgcacccggagcaaggattcagcgtttgttcccgcagaaccatgacccacccccactgaaatgaaatggaggccagtgtttaccgggccacctctgcgtacctcttttgagctctgcatattgcttttgtgccagatgggcaagaataaatgaaagcagccatttctgctagggagcaatcagagcttaatattgagctttttggaaactgactcgtagcagtcataggcaagggccacttccttgaggaaatgaatgaagacgtcttgcttttcctaagctaggttccccgtttgtatttcttgacaagggccaaatgtgtcatacaaaggactgttttcattgtccctgtttttcagtttcctccaagccctaccagcttctctgcttctgcaggaagtttaccaggaaacaggtgcacaaaaggaagaatttgctgaggccctggcaaactggaaactgaatccaggtggccaaggtctaatcctcccctacaccaggtaatttctctcccttgcatctgatcttgtgaagtccatagttctcaggtggcccatggctcctccagtacttctggaaatctttgcaccagtgccttttttttttaattttttattttttgccatacatggctttgattctctgctacacatttctcagatggttttatgagacctcaggaataatacctatttcttggctttgtgtgaggactcagtgaaacatgttaggaatgctgtgaagtctggttggcagtgcagaataagggctcatttattggactggttgttgggtcaggtggggcagtctatctgtagatatacagacacatagatcaatgaacatacagatggagatacagctatatagatagatgcacatgtacacatacatatagtgtattcacatacatgtattaattcaacattttttcttttttgagatagagtctgagtctgtcacccaggctggagtgcagtggtgcgatctcggctcactgcaacctctgcctcctgggttcaagagattctcatgcctcagtctccctagtagctggaattacagatgtgtgccaccaccacgcctagcgattttttttttttctatttttagtagagacagtgtttcgccatgttggccaagctggttttgaattcctgacctcaagtgatctgccctccttggcctcccaaagtgctgggattacaggtgcgagccactgtgtctggcctaattcaacactttaacaaataatccagtgcctactatatgcaattcactgtattcatatttacatgagtggatcaattattagtcctatttgtgaaatccaaaaaaagaatctaacatttgaatttacgtaagaagtgttggaaaaactgttttcccaaatgagctaagatggaggaatgggacttttaggagtcggcttcacaagttacctgctaatcattgatctcaatgtaggctaatcccaggcagtgagagatggccattcgagggcatcactgcagaagacctggcattctgcctccttttggagtcagactttggtcccctgcagtgtttgccattgtgggggcatcagatgctgatgggcagaatgaatgtggaggaagttggcttcactagggcaaggaatgaatggccaccactgcttttgtgccaaaggactaagcctccctgggagagaggacaagaacaggctggaggaggggtgcccttcatcatcttgtgagcatctgggccaagttcagggctggtgctctcgttcagatagatttagctggtggtgcagagatccgtgagcttgcttttacaggactttaatgatatataaaagcagcacgaggtgctcctgactgtggattaatttggagatgactttctctgttgaagagtagcaagactctcgcgagttcttaaaaatgcacttgtttggtatgagaatgaaaagcagtggctgaagaaccaatcttcaatgggcaagccttctctggtaagttaaacaaattcaggctgggatttagaggaattcgtgcttgtgtaaggattagggcatgccaaagtgaaaactccagtatgcaaaagtattactgagaggtgatttagaaatacagatacttgcgtttatttgacagatctggagcagttactgtctgctgcaaaggttgccactacggatgcaagaggaaagggccctcatgatttctgtttgattgtggccaccaagactaaatggcggaatgtaggaattacaaaagcatggaggaagggagggaatttttgcaactcatgaataaccttgtaaatggaaaagcctgctttacccctgaaaaaggaataaaagacttgagtttacatgagaagtgttaaaaaaaatttcccgtatacccttgccttctggttaattccattttaaaattgtaatttaaagctaaattaaaagtaagccaatgttgtggaggcgtggagtggaatacaagtacctgggccccacttcccaagatctggatttagctggtctgagatagatcctaaactctgaatttctaacaagctcccaggtatgctgatgctgctgttctgcacgtcatacctggggtggcactgagtgagaggttgttagttttccatttttgaaggtattgagcagagaatggttctcaaatttggctgcattagagtcaactggggagctttaaaaaagccctagtatcctgactgcatcccagatcaacaacagcagaaagtcccataaaagcaagctcatggatctctgcaccaccagctacatccatctgaacaagagcaccagcactgaacttggcccagatgctcacaagataatgaaggctgtggggttcaggcatctgtatttttaatagcttcccacatagttcaatgtgtagccgaggtgaagaactgctgctctaggaggaaattatttgaggcaacggcaaccaaaggtcttagtcatcatgaggtgtcagaatcactttggagaccacgaatattttgtaacgcttcctgtcctatcttgaaatgaaattcacagattgtataatctacttacatgcatcattacaaaaagttctttctgtaatataaaggagaaacaaaagagaagttgaaaaaggtaacttttggtaaacacacacacacacacacacacacacacacacacacatattcgataggtaaatgcttgggcacaagctctctagaagacgtaataaagtatccaggtgtttgtcttgtaagaatgtgatcccgacaaccccagagccaggccaagcctggagcacaggaccagtgactcagacactaccggcttggcgtcatggtgccgtggttttccatactggtgaaaaacgctcagtaaatttctaggcacaacaacacacgttgactgactctgggttcctgcatattccgctcatactaaaccaggcgataatgctctatgattacgtgtcagagagttagggcctagggtaggtaattagcaactggttgttcaccgacatgcatttcaggctgaattttgagcatttcagaaattctagcttccctcttcctcccccaaatgcgaagatgtctccactataattgagcaatcacaaacggccccttccaatgtctcagggctccccgttgaacacccatgtggaataaggagtgaaggtgagctcactgaaatgcactcgatgccagttccaccttccacaccggagcagcgtcccgcagaccagggctggtgggcgaaactggtgggcaaaatggggtgggctggataaaggactcccaccccaaatggctgcaggggcctatttgagggagtggagagagaagggttgcgggcttccagccaagctttaccctcactgaaagttcaggttcagggcccagtcccccagcgtgaaaaagggacccttataaagaggtaaaggggcttccttcaaatcccctgcacccgcgccccctccctcaaagataatcctgggaaatatttagcgatctccagtgccctctagtggcagatacttgtcatgccaggcaccaaaagatggttaataatttttattgtttaaaaacatcacacaagcccatgcaggttcatacagtaacaatctcaagctttcctgcatttccttttatcatcccgatcttactacacccctagagaacatttacattcctttcctatgcatttacaaatgatatatatgtatattatatattcgtttctatatgttacacagagatgtagacatgtagaaatatacattacatgtgcacatatgaagtgtatgacttataaataagcataaaatatattttgtatggcatatatgtgtatatattttatatttacaaatgtaaaaatattttaaaactttatataaatatataaaaatataatacatttaattctatgctttatacaatatgtttatataaagtttatgcttatattgataatatatttttatgtactatataaagtctgaaaatatattgtataaggtttatttttatttttatttatttatttttgagacagggtcttgctctgttgcccaggctggagtgcaatggcacagttcactgcagccccgaactcctgggctcaagggatccccccacctgagcctccgaagtagctaggactacaggtgcaagttgccatgcctggctaattttttgtagagacaggatctccctgcgatgctcaggctagtcttgaactactgggttcaagcaatcctcctgtcttggcctcccaaagtgcttgaattacaggtgtgagccacacacccggcctgaggtttttaaacacaaagtgatctgactgttttaccgctgcatgctgttgtgcagtgtggaaataatctgatttgtttgatttttctcccctacagatggacatttagatgcctttcatttttcttccattgcaagaatactttgtacatatatgtgagtttttctataagaaacacttccagcttttcatttaagtcagagactcaaatctgaaatgcaaaagcttgtaaaactgtgaagtgttaaaaatcatcccgccaaaggagtgaggtgaagggaagttttataaaattggaatggaaggaaaaggctggacaggagtgggatggcgtggctgagagggagataggaggctgggtatggatgaggagtgggaagtgtgggatggcgtggctgagagggagataggaggctggatatggatgaggagtgggaagtgtgggatggcgtggctgagagggagataggaggctgggtatgggtgaggagtgggaattgggaacaccgttttcacctaaagctgtattcagggcctggggtttttgtttttgtatttatttagaaaatagataaaacttctatctggttcaaaattcgacaacaacagaaaggtgttagatctcatcttccttattcttctgtcttccagccgctccgttctccccagcagagccaactaaagtaatcagcgtcttctgtatccttccacagatagtacatgcataagcaaaaagaaaaaaaaaagtttctttctctttctcattttcccttcaaaaaccaccaataattgtacctgacatacatagcctgccccttttcttcattaaataatgggagattatgtcattaggaagaaacagatttcttcattctctctgcctggcattccattatgtggatgaggtgttatttatttaagcagtccgcacctgaaggacatcttggttggttccaatctttgctatgacaacagtgccacaatgagtagccttgtacaactgtcattatgtgcatgtgtggggacacatgtaggatacagtcctggtagtggaattcctgtctcagagggttttttaaaaagaactgcaagttgccgtctgtggaagccttgccagtttgtacccttgtgtgttctgcttcacctctaccagcaccggagtcactgagcgttatgttatttgccaactggataagtgaaaaatggtatctcagggcacgttatgggacatgttaaagtataagtgcagccaaatatcttttcaaacactgatgaggggccctggagttttagtgcctttctttagaggaattttaggtgctggtcttactgactcggagcctcttcctcaatctgcatcgccttagctgaccccagtgcactttagggcattacgtggatttggggttttctcatcctgctctccttcctttgggagtggcctccaaggcagctgtcttcccattccccttgcttccctcctatctccgtctcagccacgccatcccactcctgtccacaagccgggtgcatgagccattccagagggactttaccttgctggaataagcgtggtaaggggcctgggtgttgtggtcctccctccttgggctctggtgctctggttcccagactgtgacccacgatcctctcgcgtccaatgtgcgtgacctctccgtccgatagcacaagcaattctcaaacagccacttgagctggacgcccccggacatgccctgcacttttccagctttacatcctggcctgtgttgccccctccatgtgtgatgccctccttgagtccggcatgggtgcacggctgcccgctccagcaggtcaaccctcgggcccatgaacttcccctacacaagctcttgtggcaccaactgtcttcctaggtggtggccacaccaggaaacatttcccagcctctcattgctcttgaaaattgtatcatcaaatagcagcacatgttaaacagttaagaagaaaattaacatgcaaaattaacagaagaagaaagagaaaatgcaatctgcccaaagctgttcttgacaatttttggagtgatttaatgttattttaagttttatgaagaaagtacaatcttatcaatatttgtatcttgctatttcatattcactgcaatttaatatgtaaaagttaccacagggacactaagtggtaaagagttaatggtcttccctgattcccactgcctgaggccaaatttccatccacgccaagcatgcttttcagcatctccaccttcaactgctgttatctgtctgccctagcttcttccagcgccccagggaaaaagctgcatcacattttggagggaaataaagaaagagaactaaagacctattggatttcagcctttggttggtggttaataacctagatagctcaggcattttccaggctggagtgcagtggtgccatcatagcttactgcagcctcgaatgcctgggctcaagcaatcctcctgcctcagcctcctaagttgcctagttaatttaaaaaatattttgtaaagacaggggcttcactatgttgcccaggctggtcccaaactcttagcctcaggagatcctcctgccttggtatcccaaagtgttagggttataggcctgagccactacacttggcccaagaatttaattaaagaggtgggatgagcaaagagttcctggagggaagctagctttcacctgccttcctgctacctggaaggtgctgtttatgaattcaggattcatctgtccacattgatggttttcttagcttgtgaggttactgaaacaccattattacagatagaaaactttccccagtggccccttgagacaggttgaataatgtcacttaatctctataaccttcctcttaaataggcatggtcactctctcttttaatgatgagaaaaacgggagaagagaagtccatagaaggatggaaacttggcctcaggcggtggggctcaggcccctgctctgttctggttccatgcacttagtggatgggaagaccactaactctttaccacttagtgtcactgtggcagcttttacacattgaattgcagtgaatatgaaatagcaagatacaaatattaatacaattgcactttctgcataaagcttaaaataaagtgaagtcactcaaaaaaaggtcaagaacagctttggggcagataccttccttccttccttccttccttccttccttccttccttccttccttccttccttccttccttccttccttccttccttcctatggagatattgttacagggaggcctatgggatcctgcctaactagttttggaggcaaatgctatgtgggggcttgtaggaggcagcgctgtgcttgctggagttaagctctaacctgagttgggtttgcatccagctgctggttggtccagggaggtctccagctgctgcttggaaaccaacaaaaacagtagtgagttccagaaacgttggagtaaggtggtgacttggtgataaaaagtatttctggaggaaagggaaaacactcccattttattatctgtgaaatctggtggccaatgaaaccacttcccactgacttgggtggggaaggcagatacttagattcacgttcccaaaggagaacattatgcaatggaagatgtagcttcacagtatatcccactctgtcaggactctgtgctgcatataaactctgatgtgaaaagcattcttcctccctgggattgtgcagttcccaggctgggcagctgtatactctagccctggataggttgatttgtttaaggaaggctgtttgctagcaggtatacagagataatgcattttatatgcagagttagtctcttttaaaaagagaaagctgaaaaagcctgaagacataaaaaacaatctattcactcctgcgcctctcccttctgcagacacagaacttccctggcagctctgatctgggggcttcctgtaggtgcaaagacctggttcttcagactccatccatggaaggagggaacaccagtcacggggaggtgggctctgcactgggttccagacacagcaaaacagggcctggcataggtaggaaggggaaaaggaggccctagtcaaagggcagggcagcctcaaagttgaccccaaggctgggaccagggggtacttctgctcctttctgtacccagagtcaaaagaaacagttcattcctcttaaccctttcattgaatcctccccgcaacttggcacccctgaaaccacatagagaaatcacttctgttgtaaaccctttcttggtggccccctgtggcagcaatgacttaaagcctcatcactcatgatagttgtgttctataaagctgccacgaacactgaactagtagacgctgaatcgttgctcctaggagaagcatagggttagattcctgctggcctctggtcatgttttgtcagctgatcggtacataacatcattctatgtatgtttctgttgacagatgccttgttggtggtatagtgtgaatccattagcactgaactcaggaccagcaatggtgtgactcaggcctgaaggaagcttttctagcacatggatttcctctgtaaggcacctcacagcctctcgtgcctgggaactctagccagcactgtagcacgatgcctagggccattataaatgtgaaatcaccaaagaaaccccacaaaaatgtgaaaatcacggcactaaatagaccacaaaaaggatgcttgtttgactgcaaacaagtatgagaactggaaccagaaagtaggatgtcatcttgttcttccttagcactggatgactcaaatttctctccactctgccagtgtctttgaatgaccaggaaattgctgggaatattgattttgggataacaaataaattttatcgactagctgaatttgcaaatatggagtccacaaataataagggttgtttgcatcttgagttaattgccatttaaaaacaatgtccttttccagtttgttcattcatcgtggtccaggtctcaaaagtgattcctcccaggggtcaggtgggcagtgccagggtctggtggtgactcaggtggaacagaggtcactggccttgtccaaaggaggctgcagctcctttcctcctgcaagcttggtaggggttggggcctcatcaatttttcttgggaggggcccatagtggcatctgtgtgagtgtggccagggatgtctctggaagagggggttgcagactgagattttctgtttatttggagggtgaatttggggtgctgaagggcactggggtgtctagggcttcctatgtcttcccttagtgctacctctgggactccattttgtcagagttcctgatatttcatgagaaagctggaaatccaggttttttttttttttaatcagaaatgtcaggatttaaaaatataagcagctaactaaaaattcaaaaatccctaaccattgtgcaagccaaatgaaataggcataataaacatgagctgctatgttcctaggtgcctggtcagctgggatacaggtgaggggctgacggcaggtgcaggtgacccccttgcccactgcctgtccattccatgtgttgttgcttggacccattaacattgtctgcctcatatttctgtttgaagaaagttctgctacgtgggtgagtcttgtctatattgagagcagggttgagctgcagtcagttataaagtctaccttcagtgggatattataagggttcacatgaattgaattaacaacatttttatatctgaggctacacaatcctaaaggaaatgtgacttctacagagagaatgaagatgttcctagcactttcaaatatatcgagcgttctccaataagtgtatttttttcatcttgtgcatcttgtgtatgaaagctttctgtgaggttatgtccatgaaaacaaacgcctttttttcttttcctcataaaagcggaataatgaaagataaggttaaggttacaccatggctacagtggttgtcaacaagccttttgagattgtctttttctgttgaaatcagttaatgaattggagttttccactgagctcacagaaggtagcttttcagatctgggagcagataatcagagagacactttttccatgcagcatgttgaagggcatcatttggtcttgtggctacaccagctgagtctggtccaggaccaatctcgctaattaccacaggtggacctttggcccaaggaagcaaacaaggctttggggcacttctccatggccgccttgggacccttcagaagtgataagccgccaatctggaagctgcttgggtgataatgattctcgaatgggcttttatgtggacgagcaacatgacctaaggcaccagggataccagaaaggacactttttatgcagcttgaaatgtgagtagagagcaaaacagatttcaaaagacgagcaccgccgctctctcgacattataaagtgtcttctgagtgacaacagtgcatccttgtgcatgaattgcacttaagctttgtatttttggaaaataacaatctgtgttttctggttactatagacccagtatgggcctagaggttttatgtgtgcaggacctcattcgtgtaaccctttcagtgattgggagaggcaggagtggttcttgcccccattttacaggggaggagacggagatccctaagctagtgaaggatccagctgggactctctagctgaagtctgtggatcccaaagcttgtgcttgttgaggatcaagagatgatagaacttgcagtggcttggatgtggcaggaactcatttcacttatcttttctcaagacatgggtggtgggagtcgtcaggctgatagagcatctgacgggaagttaaaagaaatttagcctggttagtagtgtgtttggaatcaccttgtagggtttaccttaaatcatggggattgttgcagattcattatctatgtaaaaaaaaaaagcctctcagtgatgccatgggagggccattgtggattactgcttgattaatcacggctgagtagggagagttgctgtcattttcctttttctcttgtttctgtgaagttcctcaccttcctatctcagccagatgtcttcatcaaccccatctcctcccagctccttgggaaacttaccacatctgttttctttttacttttgaatagtctttttctgtcaactggactcttcttattttctttttcaccaatgttgcaaaagttgaaagaattgtacagagaaaatcacgcacttaccacccagatgccacaactggcatttgctgtatgtgctggatcacacatctggtcttctgtccattcttctaaccgcccaccaagactttaaaaaaatgcatttcaaagcaggttgcagacattatatactcgcttcctacacacttcagcctgcataccactgaccagatttcaagattcatttttgttgctttttctgttaagtaaaaatttacagtgaaatgcataattctcacatgtagcattgggcaagttttccccattagcttttaatacatctgctaatctctcctattaaaaaaccaagccaaatctgccctcacctcaggcccattcagctactgccccgaattgctcctcctcatttccaatcagacttttcgaaagcactgcacccgtttcttctctccagcctctccctgcacccatctggccccgtccctacccatcctgccatcttcactgaggttaccaattccttctgtgtcaccaaatcaagggatattttctagtcatcactctccttagccctcggtcgcacctcaagctcctttcctctggacacactcccttgcctgacttgcagggtgtcacgctccctgggctttccccccagccctctggccactttctttctctcatttgaagtctccttcaccattttatcctctgaaattaagtattggaattgcttagggctcagcaattccatactttttcctgactccatattttcaccgacatgatctcatcctcttctgtggtttcaatttctgcccccacacacatgaccctcacatttgcgtgctgcctggcatctctcctggagctctaggcctgtattccagctcagtgccccttcttagatggtccagaagcacctaacatgttcatgtccaaaacctgaatcagtctttcctcttcacacttgttctctgtcttagtccattttgtgttgctagaatggaatatctgaggctgggtaatttataaagaagaaaaggtttgttggctcatgattctgatggttggaaagttcatgattgggcctctgcatctggtgagggcctcaggctgcttccactcatggtgaaaggggaaccccggctctcagagatcactggtgagagaggaagcaagagagagtcgggaggtgccaggctctttttaacaagcagctcttgctggaactaatagagtgagaactcactcactcccatgggagggcattattctgttcatgggaaatctaccccatgacccaaacacctcccactagtccccacttcccagcattgacacactggaatcagacttcagcaggagatttggtggaaacaaaccatgttcaaaccacagcatcctcctctaggattcccccagcacagggagtggcattaccattaactcagggggcattgcttgtccctcctccattgccaaattgtattgattttgcttcttacaattatgtcttgatgccaccttctgcttctctccactgccatagtcagggttcatatccagctgggcctcccaccctcttgatgccctcccagcatgcattctccacccagtagccagagttctgttctcaaaacactagcctggtcctggtgctcccctgcctacaccccccagtggatttccagtgtcttctgtctttgcagggattgcaaggatcttctgggtcaggcccctgcccacctcttcaggcccctctccctaccccctgaccccaacactttttgctctccaacctcaccagcccatcatgccttggttcctcccactgctggcctctgaccatgctcttccctcttcaggaagcccttgcccctctccttgcctgcccaggcctccccatatacacaacttgccttgcaaatgcctccttcatgttatgtgtcccatgatgccacatgcctctcctttcagatacttagcatggccacacttttatatttcactgtgagcatctttgattaatgtcctcttcctcatggaagcttcatgactatatttttttcctttgcctttgtttgatcttcaacatctagtgaaatgcctgacacatattagacacacaactgtttgctgactgagtacatgaaatttcattctttacattttcctaattttttaatggaaggcaattaatgttagccaaggtaccaaaattggagaattagtgtaatagctgtggctcagattttaaaaaatattttgataaatctgggacatctaattccttgggcaggaaacaaaggctcactcatgtcacctcagtttttaaaaaaatttggacagtggtcatatactctgtggcttacagagcaggggcaggagacctggagcctggagcctgaaaatcatgtggctattaagggtgaatgcctcctggtcgtgctgttattcttgtttgcagaatgggacagtcacatgcccctggggtctccaggacttgtgagaatgggataatatttgggtgtctctgcaaaacgataaaatcacattagtccactgtggaacgggcaatcatgtttaggatcaggattccaccaaattttcctgttctgtcttgcaaagggcaggacgccaccccttggaccatagtggaaggggctgctttattgggtcctccagctttggagacttgagaactgggctgaatcagtgtcactcttattattattaatgttgtgatgattggtatttcagtaggactggctctctgtaagctccggccatcccatcaggattcagtggcctgcaagaggttgaccatgatgctccagctgaagggtgctttggtccctggtgccagggtgatgggcagctcagtgggaatgcacctccatccgaaagcacagggagccggtaacccagggatgggctctcgagaagctgccaacccaatacttctgggaattggctttctcttttccttgttgtggaaacctcaccagctgcttcatgggggaggttaattaatgcaattaacaacaaatgccttaattgcagatgtttagagagacactttactattattattgttattattgttttgtgtgccactctctgcacacttggatatctctttattaaagcaaataaaaccataattaggtgcagcccaattcaaacagcagcagcagcttggagcaggaaaccataattcaagaacaagaggcattcttgacaaatattatgttgtctgcctagtaactggttgtgtgccagggtgctgtgagccacttcaggagagctcttacctgctttctctaaagcctggacagaggggagaggccagattgaaggagacaggccgtggggagctagggccatgctggcagccccctcagagaacaggcccttgaacaagctcacgggccaggggagcttgtattccaggaggctttgatcagaaattgggaattacacaggagcttggagttaagggaaaagaaaaggaagacagtttactgctcttaaattgtggttttggaggattagaagaaaggaaccagagatcaggttagcatttcaaggcgaaacaatcgataaaacacacattccgggccttgaccatggatcaaggccttgaccatgaagtctttagctgtgtttcccgattgcacggacggcttatagtgtgaagttgtgtgcatcgatatgctaatgacggcctctttaagtgaaattaatgcctggattgtgtgcttagagcagcccttcattattccctgtgatatgaagatgtgttggagattcttcccggcttctcagtgacactcttcatacaaaatttatctcttttatgggtttgaagctctttcagatacatatcaaagacctttccatgcctctaccctgcataatatattctgcaacagcttataataaatcatcctccttccctgactggttagccgtgagcaaacatggctattgctggcaccgaaaggatgcgagatcctcatatttaatgctttgcctcttatgttactactgtctgtccttccatcttccctggggagccccacaaaatagcaaggggctggaatcaccggcaatgctgttctgattttaaagccattgtctgggttgataatatagaaaatgtaacatgttgttctttcatgttgaaagaatcttttcctctcgtttgcctcattttctgatttcacaagtagacgtggcacaggtgcccactgtatttccaaaggacttaggttgacaagggtgaccatattggtggttgctaatgagctgagcatagatgggctttgttgcatcttgttgaggagagaaatcaaatagaacaaagggaaagattgtccaaaatggtggtctctggggtaggaactgcaccatggctgctggctgctaacacgggaggcggatcccactctaacatgggtgacttgggagaaagcctccctcagagaggttccctgtgtgggcacagagggatcaggctttccaacgctcatgggtcaatggggctcttgtgtttggtgtgagtggtggggtagaaggataggtaatttttttaaaacagaaacagaatttgcttttggtgtggttgttcccaaaggccaatgtgtgttaaaggaaatgcaccctgtgatggatatggctagctgcaccccctttcctcacccaaacctgctggctttatcttctgtaaaaatttatagctggagagatggttgcatagaataaatgggacactttccagattcccttgcagctagctgtggccactgaggttgaccaaagattaagtaaaattcctgaagtcatacagctagaaaaacaacagaggtaatatttgaacccatatctgtttgattccaaaaccatgatctttattgtctcctttcattctcttagaggatggagaatttcaatcaggtagtttttaaaatttccagagaataaagaatacacttaacaaaaatggcttatcttaaatttatagtattattattaactacagataatctattgaataggtaacatgtattaccatacatcaacagataaaaacatatcattgggacaattaccgaatggtttctcataaattataaaagtatttcaattagttttattgaggtataatttacatacaatagaatctgtagacttctgttggatagcttgattaatttggcaaatgtacacagtcatgtaaccatcctcgcaatcaagatgtaggacatttccattactccaaaagctctccatgctgcagtgtattcaacccatccttgcaactccagcacctggtaaacactgacccattttctgggactattgttttgccttttctagaatctcacatatatgaattaactcttgctttccaattattatgttggggcagtttttattagaaggctgttttggagtagaaagtttggagttttcctttatagcactgcagattgaagtcatgtagaccaagtggctattgctttacagactcagtcaagtgttcttttccctgttgcagagggaatgggatttacattgtaagcagcactataaaaatggctgtgcacttcctcagagccactctgccagttacctaaactgagccaccagaatttactgatgacacttgcgagtaagtgaactctttatgcacttaaagaggaatgtttactatttgtgtagaatattggaaatgtccaagtcagagcaggttaattggatgcatgcagtagttgggaggtgggctgaggacacttccaagctctgaaggctcttccaaaagtcccatgacttgctcaaagtctgaggccccctgctaagttagcaaatgttttgtccaagtgtaggtctgaaaaaatgcagcattgtctctctgcagttctcaccagagccagacctgaaaaatcaggcacctctgcggtcagctgtgttgggtattattcttggagtcttatggacagcaccagagtcttgactacaaaagccagtcatggctggactccctcagacgcttccctacatctgcctcacattgacttataacccttgagtaggtaggactaagaaaacaacttctgtttcaggatattttagtttggatttccccagaagcagaccctgagacaaagattcgagtgaccatctggataaacatcctcaggggatggggcagtgcgacaggaaagggaagccagttacactggcaactggaggaccgttcctctaggaaactctgggagatggtggtgagctcgcaaagaagaggccaggaagctgaggtcctggtgctgccaatccctgtctgtggctgggtgagggctgcgtccagaagcatgggatcgccaggactcctggctcaccctgtgagcttgtggtcagtgcattccagagtacacaggaagcagcctttggtgtgcaagggtagcactgaggggcttgggcagggcacctgcagggactgctacacaggccataccaggttcccttcttcatgcactgtctaaaccgtgcctactctccctgcacctgccataaacactgtgttcctcatcagtttgcactgggccatgtctctttagtatcttaccattattgccttttctagaagacttctaggatctgcctagataactcctcagccatcagatctcatctaagcacgcttttctcagaaaggcttgccctggcatcctggtgagcgcaagtccccctgccacatgcggagggggcgttggtggacaggcctgcccagtgctcctcaagaggcttttcagcagaaaaccacattttccagactcccgtggggctgggcttctggacatcattgggaagtgtctttgtagcacaggtggagtggagcctgccttctgatttttccactttgtgctttctgcatttctggcaagcagacctggagatgtggggttgttctgtggttcctttccagcagtcaagttttgtagtgtcaagagatcaacggagggaaggtcactcattattttgtccttgtgtatctatctggtgtgctgtggtttagaccaatagttgagatgataatggtttccttactgatctttggatcaaagagaaggtggtgtgttcccagagcctctcgattctgtttctctgatggtcccatggttggtggttgtccttgaggaacaggcccatggtattgctgagagtaactggaagtctatcctagagtctgctgcttccgctcttccaagattttgtaagcactcagcccaccaattaaatactctctgctacaaaataagatgtgatggcttatgtctcctaaaattgaacttcagtggatatgtctaattgcaccaatactttttattttgttttatttttaaaattaacacataataattgtacatatttatgggtataatatgatgttttaatacatgcataccttgtgtaatgatcaaatcagggtaattaacatatctgtcacttcatgcatttataatttctttgtggtgagaacaattggaaacctctcttctagctattttgaaatagtcattatattattgttaactatagttgccctactgtattttttaaattttatttttattttccacatacttctacttggaagcaattttatatttatttgtgggagtatataaaataggggtcttctattcagaaggtgccatgacgatgggcttatatcagctttggctagtataataacttagggcaatggttctcaaacaggggtgactttgtcccccaggagacatttgggaatgtctggagacttgggtcatcaaaactgagaaaggtgcttttggcattgagtgggtagaggatggggacactgctcagcatcctacggtgcacaggacagcaccgacagcaacgagttacccagcccaaactgtcaatggtgctgaggttaagaaactcggatttatggacttctgtcttttttttttgagacaggatttcactcccatagctcagtctggaatgcagtggcgcgatcttggctcactgtgcttgggtgatcctcctgactcagcctcccaagtagctgagactacaggtgcacaccatcacacccagctaattttttgtatttttagtagagatgaggtctagccctgttgcccaagctggtcttgaactcccgtgctcaagtgatctgcctgccttggactctcaaagtgctaggattgggctgggcgaggtggctcatgcctgtaatcccagcactttgggaggccgaggcaggtggatcacctgagatcaggggtttaataccagcctggctaacttggtgaaaccctgtctctactaaaaatacaaaaaattagccaggtgtggtggcaggtgcctgtaagccagctactggggaggctgaggcaggagaatcgcttgaacccaggaggcggaggttgcagtgggccgagatcacgccattgcactccatcactcttgggcaacaagagtgaaactccatctcaaagtaaaaaaaaaaaaaaaaaagtgctaggattacaggcatgagccactatacctggctggttttctgaaactatatcagatagtgtacaggatctttgggagagcagagagctcggtgaaatgcacaagcacaacccagactgctccaggaatcatcctgatgctgccatcccatgcctttaaggactagatgccagaagccctcctgggcaggggcgtgattattgatccttactgtgcagagaaggacgtggaggtatgcttgtcttgacacaagcttgggtctgttctagtccatgctttcctggactcccacacccttccttttgtgggacgtctgtttggaaaaaaaatcactaataacctgactgaatgacttgtaagttctagcaagtaatagaatggcatttgcctcttttatccaaattggtaatgttttaaaagattttatgactttaaggtagtcattttgtctagtcatatttctgtgtggggaggtgctacatatttatgcacacataggctatttatttaatttttaaataattcaagaatatattatcatcatagaaaacatcagacaataaagaagtgcacagagaaaaaagtgaaaataccatttgaacccctctccctcttcactttcaaacccaccgcccttcccaaatgtacctgcagttccgttctggtgtatattctagatatttggtgtacatatattttctatgtgtttacatgcacaaacatgcatgtaaaaaaggcatcatcttgttttcaggatttgtctaatccttgtgatcatatgtattattttgcaacttcctttctccatctcccctcccacactttctttttcttttagcttgatatgtcttgaagaactttatacccaggaatgtctggcttcacctcattctattggctgctgtgtagtgtggcttgggacagatatgctgcattcaggcaactatagagtggtgatcacaagctctcatcctgctgtcagcctgctggggttgaaattgtggcttcactactttgtacatatgtgaccttggacactttacttagcttccctgttgcttgtttttctcatttgtggcctggttcttcatctgttaaaaaaatgtgagcttgttgaagtcatccaacagattaacaagatgtgcttatactgtagacaccatctaccacattttccccaggtcttgacatgagaatggatgcagtttgaattgcattgaaaccttacttcttcttttctaaaattttcttttccctagcagaacaattctaaacagatgtagttgaaacccaggttttgaaaattctgagcttaagaaattatattttttatagtttcctagaaacttttccttcatgacctgctggctacaggcaggatatcagttgattccaatgattctttatttcaccttggcatgtcttttatcagaaatcatatggaaactttttaatttatgggcttttattgcaatcctcaattcaccctgagtagtctattatgaagtgttctagaggttcttattgtcccttatcagagaattgtatctcggtgcaattcatctgtagtcattcttcacagagaaaatctttcatattacctttctttcatcatataacgacaactcttgaatacatcattattccacaatgagcttataaattattatcattaggcaatttttcatataatctgattttataaactgtttctttttattatcgttagaggggaaccagtaaatgcatctgtctgttttgatccaccatgataacagtaatagaaaaactaagtaaggacatcttactgagtcgcaaacatactggatttgtaatgacttcagaccaggatattcgtgtgcaaatggcccagcaccatggccctctcttatgagtcacggtgccacccatagtggcatcttaattggtaatgctgagctatccagatgtctttaactgaattttttccccacagaaatgagtttttatttttactttttcttttttgttttgatacagggtcttgctccgtcaccgagtctggagtgcagtggtatgattatggcttacttgaacttctgggctcaagcaatcctcccacctcagcctccagaatagctgggactataagtgtggatcatcaaccctggctaattttttgattttttatagagacgaggtctcaccatgttgcccagacaagtctttaactcctgggctcaagcaatcctcccacctcagcctcctaaagtgccgggattacaggcatgagccactgtgcctgacttccagatttgcatcttaaagggctgttccattgaagtaagttttaaaaatgtaaaataaaatatttttaaatgaagaaaaagccaaagtaggttacaaagtagaatatgtgatttgctgtgtgtaatggtaacccaagaaagacccctcacctgtgacctacctacctccccgaaacctacttacctgttcttagagaatgcatatttttttcatatagaagtagggaggtacatttttcacatatggcttttagatcagcattgtctaacagagcttactgttctgatgatgcacatatttatcctctgttctgttcagtatggtggtggtggctgcatgtaacattgggttgtgaaatgtggctactgctactgaggaactgaattttaaattttatttaactttaacacttaaataggttcatgtcgctggtggctattatcttggatagtgcagttttaggttgtccttagttgtggtatgtatattctgtgttactgcttgtttccaatagtatggataattgagaattgactaccttttttcccccagtccaattaatcctttaggtgagtaggacaagtaacattcattaggaagacaacaacttttttttttgagatgggatctcgctttgtcttccaggctggagtgcagtgatgtgatctcagctcattgcaacctctgcctcccaggcttgagcaatcctcccacctcagcctcctgagtagctgggaccacaggggcgcgccactgtacctggctaatttttttgtattttttgtagagatagggtctcattatgttgcccagggtggtcttgaactcctgagctaaagcgatccaccctccttggctccccaaagtgctgggattacaagtgtgagccatgatgcccagccaggaaggcaacaatatcaacaatagccagccttctcaggttctggttgtgttctcacacattgcctgggttaactatcaaattttcccactagttatgagggaggtagtacttttatcttcattttgaacttagggaatgaaggaagcacagagaggttaagtgccttgcctaaggccacacagctggtggctgtccagctgccctctttcatatcccatctatgtgtgggtttggctttcgattctgctgcatttacaaatgtgtctacccctgtactgcttccacatagttttattaatatttactaacattttatattaagttctgataactgcaggcaagtctccctctgtgttctttttcaaattagtctttatccattccagagcctttgcttgtttatattagggcctcacaactttggtaccattggtacttgggtctagattattctttgtggtagggtctgtcctgtgtgctctagatgatgaatagcatctctggtctctacacctggacttcagacattgccaaatgtccactggggccaaaaatcaccctttgttataaactataattctgtataaattgtagagtcagtgtatcaaatttcaaaaacagtttggtttgagtgttgattgaaaccctgtcaaatttataaattagttttgggaagaatcactatcattataatattgagtcttctcaaacatggacctgtttcacctcaacatcttctcaatctcatttcatgtcttttaataacattttataattttcctcatgaaagttgtgtgcatcttttgttaaatttattcctgggcgtcttgtagtgttttgctatgataaagagattttttcttttctgattccaagaattggtcattactggtgtaaaagaacattactaatttttagtgtgtcttgcatatgaaaatcttcttgaactcttttattaattctaacagtctgcacatcttctagaattttttatgtagataattatattgtctgcaaaataatcacaatgttgacccattgtttaacattcttacacctttaacttcttttcctcatctcattgcattgactaagacctccaagaaaatgctgaattctcgcaaggacagagggacactttcattttgcaagcaaagagacaaagacttgggcctgtccaaggtcattcagcgaattagaacagagtcaaggctagattctaaggtttacaaacttctttttcctttattccttcttgctgcttttgtttttggttaatttagttaacataaaaacaatttgctgtcagacccttttcattttaaacgtattaaagcctgaaaagaaagttacttacagtcttttattgcctgcggagtataatgcatcagcacactaatattgacacgaaacctctgttattctttcattacaaaagcatgtcaactctttaatatctactagcctgcaagtatgtttccccttgggaaatgcctgcagtagtgtcttcctgttagtgagagatattaagaggatctgagtcttataatagcaatagctatgtttgatggatcacttaaaatgaagcaggtactgtgatagatactttacaagtatgccctcactatgtctttataacaatactctaaggtgtatattattatccgtgttttacagatgaggaaactgagcttcagggtattaggtaatttgcccaaggcctcttgtttctaagtttgctgagcctggactcagacctgggttggacaccaaagtaaatggcctacttgctatagattttggttgccgttaggtgtacagacgtaaaattaatatgggaagaattcaaattcagtttgatgggtctaggaattaattcttttcactgctttagcttaagcaaatgaagttatctcctagcattacttccacataaatacatacaaactagtaatagatttgatttagtaaatgcctccaatatgctgggcacatcatgcatattatctcttatctgcataacaaatttgaatggaaagccttgttagtaccactttagggatcaagagactggggttcatagagatttagtaacaggtaagaaggagcacagctaggttgcacactgctttttgcaccacgtcaggcccaccagttggcttgtgagcccaaagctgtgttttggtcacactagattcacagttgaaagaatatagtccagcagctgcattttaaagaatcatttccatcattatgcagtatgtggaacccaagagaggcttctataaacatgagtacatgttcccagacaaaggagataatatcgatgacaaacagccattatctagaacatctgttaggctgtttctcctggttttaaataacgcacggcatgctctaattcaggtgtactctgaaaacccagcagcttctcctgtgatttctgtgatctctgggtatgatgaatgagaatatctgttgatcatggagtacaccacttaatcaagcactttggctgcagatcaaattttctatatttttaactataattatagctataaccaacactacttatcttgctttataatttacacagtgattccacattcagtgtctcataagcatttaatccccaaaatggctctgctcggcagtcattaatattgtcctcacaatagtgtttttgagattgcccacatgtatcaacaaagagagacatccaagagatattgttctttgagaagaatggatttttacaatatggtttaatgtggtaccattttagtttaattgcattcagaagggaacatatattaagcagttagttgatatctctgggggtaagagtttcagaaaagcttcttcattctattttacatatgcctgaattccttttattagtttttaaatttaaattttataaatgcagatggtttctttaaatatatattttacacaaatacaaagtcatacagggatattgtttaaaaaatcatacagtcccataaggccggtaataagagagatattctaccttgtcacctccctcacccccaccagtattagaaggtaacaactctgaactcttatagagcactgttttagggattggagactggggttcatagagatttagtaacagctaatgaagagcagagccaggtttgatatttattactccatcttaaattgagtggttttactgttatttgttattgattagttttagatattatatattgacttcctgctgtggaagatgaggattcagaccccttccgtaccttccttccatccctcatcattccactgtggtcatatcgttagtcaatgtgagatatgcacattattatgactctaggtcaataccacttgcagccaagccacaccatgtgctgtgtagacttatatttctattcatgtacaacttctcctccaaagttggtaatagtctctttttaaaaaacttttgcttgttattaaaagaaaatcactcattcattttcaagctttctgctgggatcctgtttcttctcaagatgatgcagggcagggaaggtccaaaattgagacttagcatgagagggttctttgcttcacccagggaagaattcaaggtcagtggtgagagaaagcaacttttaacaagcagtgcctggctcataggcagtgtgcccagcatcagcagtgtacgctggcaactgtatttataccactttgaatcacatgctaattaagaggtgggttattgagaagtttctggaaaagaggcgggaagtttcaggaaccatttaagttaacttccaggctgttgccatggcttgttgccatggcgtttacaagctgccatggcactagtggaagtgtcttcatggtaatgagcagttaggccaactggaggttgctttcattgctgtctgctggttttgggtggcttcttccctgcatcctgttctgactagatcctgcttccatcagcggggttgtgactcaaaaataagtcctgccagtctcctgcctcaaggacattcaagtattttgggagcagtttcatcatcttgatgacacccctcctagatgtccccgtcctcttgtcccaagattgcaggcctctctcctgacctgctcggccaccctagaagctccctgaactgccatctggttctttctgcttttcttttgggatggatctcacctcaaaagaatgtgctctggatctcacatctttctttcttgatttactgcctccacccctgcaatttccttgcctcttttcaatttccgctcctttaaatcattttagaagggtttgaggaagaaatagtgatcaatacttgcattcggtctccaggtttaacctgaagttccccatattttaagaccagaaaaaaaaataaagatttttttccatttgggtagaaaaacctatattttcaaattccactacttgaattattctgtgccttttcttcattgtgtgggtgtaccattcaccagcaacttgtaaaatccatgtagggaagcacctctcaagttgctttctgcaaaagtgtacccaaaagagacacaaaagtttggcctcaaaagtttgaaaatgtctttattttatccttgtgcttgtcgacatcttgctgaatacagaatttcaggttggaaacacttttttctagctttggtggtgttgttgagaagtccaacaacaaaggattcttaatcctttgtatacacaattttattttctttatggaaatgtttagagccttctctttgtttccaatactctaaaattcccaaataataagccttggtataaatctattttcacctattttgaagaatatttgatatgggattgcaacctggagactcatgtctttcagttctggtaaaccttattgagttaatttatttactttaaaaaagaatattctcctctctgtgtttacattcttgaactttcattgctggttatggaccctcctggactgatcttctaattttaaaggtattttaaaatttaaattctaactcttttatttttttttagaagagctatacttcccaaacttcttctgagtttttttctactatcatatttttaattattttttttaagagacagaggcttgctatgctacccaggctggagtgcagtggctattcacaggtgggatcacatagggcactgcagccttgaaatcctggactcaagtggtcctcctggctcagtctcctcagtagctgggactacaggcaagtaccaccatgcccagcatatttttaaattcttaagagctcattttttgttctctgatcgttccctttctacataatgttgttttagattcattgatataatagcttcatttgatttctctgaaaatattaaagatacttttttggtataatttttgtctttctacatgggctctgtttcctctaatttactttgatctgtttttttcttaggggggatctacttcatgctagagcttttcttacatgtctggggatccttagctgtctgctgaaatttaaaagtggagcattgaaaagtagattggaaatgttgagcatatagttaaggcttatcacttatgggttccactgtgtggtaatcttttcgggtcatcataggagaactcttgatgtcaggatctaggtcctttctcttgtgttggtcaaatttcccagagaataagcttctcatttccttttgggcagtatatttattggccagtgagtctgggggtaaataggtttgagggttccaatattcagtatggaaattccataaaatgaactatttgtagtatggacacctgtcctcccatgtgcctggtatcccccaggccagaaacgttctactttatttccaagagagtcaagctcagtcttctaacacagtgagggacatgcagctctctggaagtgtatcttcctccataggtttgcatccaattcccctatgttcaattcaggcccagctgggctcccattctgtagagtaggtacctccagaattgtagacttcatgggttctgaggttttgcttctgggcactcccatgaccaggttagaattatctttctcaggtgtgcataagtcaggaagtctattatttgttgcaactccttcatcagctctctaccacctccccaaattttgttgctgcaatcgactttcccattctccttgtctctttttaatccctcctgccccaccccacctcactttaaatcattttagaagggtttgaggaaggagcactgataagtgcttttgttcaaccttccagggttaactggaagttccctatgttttatgaccagaaaaaagaaaaaaatatatattttgcatttgggtagagcaaactattgtcaaaattctactactttaatcattgtgtgacttgtctttattgtataggtgcaccattcactaagtattgctgaaatccaagtggggagtgagttttagtttgctgtaataagaaacaaaaccactcagtttttctctttctttctttctttttctttcctttctttctttttctttctttctttctttctttctttctttctttctttctttctttctttctttctctctttctctctttctctctttctctctttctttctttttcttttctctttctttctttctttccttctttctttcttttttttttttttttttaaagaaacagggtttttctttgttgcccaggcttgtctttcactcctgggctcaggtgatcctcctgctgttaccaaaacactagtttattctaggtgctggtgcttgctgcacagaaagccaattactgagacaacaagtattgccaaggaagaaggctttaattgggtgctgcagccaaggaaatcttagtctcaaatctgtctcgctgaccaactacaattggggcatttatatcatagggtaggaatgtaactaagtgtaggaaacaggaattatggaggggtaaggaagaggagttggtctacaggaagcaggtggtcagttaggcaatcatgatgagtgaggggtctggtgtctcattgtctagatgcagtgatctggtgagtttcagttccttgataccatctgggaggtctgacagttggtattctgaggaaggaactcagataagacaaatgcatttcaagctttaagaccaagacagtatatttctatgtttatccaaaaaaaaaaaaaaaaacccagtgaacatcaattctatgggacaattgggctagtttccccacctcagcctcctgagtagctgggactacaggtgtgagccaccatgcctagcttagctcagtatttttcaaatgatttccttaattcattagtaggctgtgaaatcagttcattggattatgggcatttttgattttttaactaatgaaattgaacagactagaacaaaatggagtaaaatagaaaatatgagggttgttgtatatggtaagtgtaggaattattttataaaattgttttatattgatattaaaagcatatgtatattacattgtgatataattctcatttcttattcagagtatgtccaacaacatttgaaggtcatgcttttgctaaaagttattgaacttagctagagaatttttgatgtttgcctttccaaccagttgaatcaaattcaatttagtggttgtaggacatgccctaatctgagggcttttggaaaattttctcagtgggttgatgaagaaggtaaatggttcttggtcactaggcatttttgtttgtccacataaacctttcacttttctatcctagctcaatcccaaactttaatgtgagtgataacaaacagctcatctcttcggaccactattattttgtgtctctgactagaagtccaatgtcaacctaactgatacagatgggtactagctgaaattatcagaatggtggtcactctaagagttctactgaatgttaagtaatactaagtacatgagatttaatatttccaaatatttaagatcacctattaggctatgcatcactcttcacttttgttatctcatctaatcatgaaacagacttagagagttattaacaaggagctattcttagctcccattttatataaaaggcaactgagaaccaaagacatgtggagaattgactcaaaatcacaaagctaagtgacagagttggctctaattccatcgctccaagtcagaagttgtagctgttttgtggaagatggcataaaatagcatttaaggaggaaggattgggggccacagagaacttaggttaagtctgtcacatgatagtgctttgatcagaggcaagtaacaaaagttctttgtctcttcattggtaaagggaaggctaacactatctgccttacagggatgccatgagaattaaatggaataatgcctctgaggaagattgtgttttctaaaaatggccacaacaatattttcaatccccatggttgccttacaatgtgattttgatactcttctcatcaagagatgagctctgtgttccactatcttaaatctgaactcacgtgtatggtggaaatggcactatgtgacatctacggctaggtcataaaaggtgatgcagttcttacctggtcctcttgtcctgtttgtttttgaaaccagccaccatattgtgaggaagcccaagcagctcatggagaggcccacatagaaagaaactgagaggccaggcacggtggcttatgcctgtaatcccagcactttgggaggctgaggcgggcggatcatacggtcaggagttcgagaccagcctggccaacatggcaaaaccctgtctctactaaaaatacaaaaatgtggtgagcacctgtaatcctagctactcaggaggctgaggcaggagaatcatttgaactcaggaggcggaggttgcagtgagctgagattgtgccattgcactccagcctggttgacaagagcaagactctgtctcaaaaaaaaaaaaaaaaaaaaaaagaaagaaagaaagaaactgagaatcctggcctcccaccctgcttgagcgctcaagcagcaccaacttaccagccacatatctgaagaatcctggaaatgaactcctagactccatttgagcttccccagttgacaccagatgaagcaaagatgatgttccccactggtccaggctgacatgccagattcataaactaaataaatgatgtttttaaaaagccaccaaatttttgagtggtttatctatgcaacagtagatatatgggaacagatgtgcagcacagcatctgctgtttagtagtacttgatgaaagctcacagtgattattattactaatattattcttattgtttaaactgcattatttcctcctgaccactgatgaagatatttggaaactggaccaaaaaagtcaggagacagaaatctttttggagatttctctacagagccttaatgaaaaatgtaggattctgactcatgactacagtttagtgcccatggaattataaaaacagaaagagttccatgtccctgtcttatcaattcctcatctttagattagcaaacatccaaactactcaaacgtggtattttctcctgctatcagagcttttagaggggaggggctgcaacttattcttctaggggcagggaagcccgtaaaaatctcccatgactccatggggaagctgaaggaagtttgaactgaattgttggtccagtgaagtaccctggaccaatgcaggggaaccatgaacaccaccgagatgatgatgaaggtggcatggactgcatcatggggattctgaggacagagataatcagacttcagggttctattcaccgtttctcctgtgaatgacgcaacctctggctggggttcctttcacaataaacatcaataagctcgtagacagctattttgtctttctttttctgggctggttatgcaaactcaactttcttcattgctctttgccaaatctcctctactgttttttccacacacacttgaaagtgagaagactaaatctagacacaattagagttcaaccaagcctgcttaaaacaaaagggctgatccctgacccccacatttcatacatgtgcaagtgctcctaagggcaccattctcacatgctacctttataacttttattgagcttagggttcactataactcccagattttctctatctcctgatatctgtgctcttttttcttcctcccaattgttactgcttggcataatgtagccaatcccaattaatacacttggctgacagggccctccatgattcttaccgcttttctggcttaatcttaccattctcccgcttgttcattatattcttgatatattggccttcattcagttttttagtccagctagctctttttctttttattgttcaatgtgcctggcattcagtaatctgtagcaaatgcagtcagtgccccattcatatcccctcagcattcactatcaagggcttcctcctaagcatatatgacgtctccacctgaggcttcctggggcttgggaagaaagctctactgtgggtagggagggctggaggtggggattgggtggagtggggtggggggagaaggaaagcgttgatccactggaagcagctctcaaccatggtggatgggaatttgtgaatcaacaatccaccttcatgttctacaccgtctccccaaattcccaagctggaagggctgcgcctccattgctcatagcactaacttgctcattggcgctcttccctgccttatttcctcactcccctacccatgtttattgaagtaatctctcaaataactacatacactccaatccttttctcagatcgaagacataggggtttattgtatgtttgtggttattattaacagcagaatggctatggtaaaacaaaatgtctcaaccaggcacctcacaaggtgcaaccagcttcagttcatagagggtgttttgcagttgaaatacctggttatactccaataggattcacattcattcattcagccattcagcaaatattgattgagtgcttactcttagccagaggtagggatttcagcatcagaagtggctgcaagtggttgcaaatctgagttagaattactgttgggaaaacagaaaggtagccctaattccagggaaatagaaaggcagccccaatcccttcccactccactctctgactccatttccctttccctcccctcagcattctggctgctccttaaacagaactcagtcagctcccctctgaagtattccaccttcttcatgagatctttagacctcaaccccctttctttaacagctgctcctccaaccccttagcctgaactggttcctcagggtgaatcagcctatctcctctatcccctcttctaagcatttagtttcacctccctctgctttggcatcacctattacctagatatgtcctagactatggcacggcacatgcctacttggaactgtgtctccctttctaatttgtaatagacatacatggcggctgttgttgccataaccatatcccactgcccttaccacttcaggggcacactggcccgatttccagctggctgcacctgcatttattgatctgagcttgacttcccacctgtgcagcgatcacccacagggatggcaggcttgataatgggccctttcaaggctgcttcctttccctatcccacctccctattcctctaccgatgttttattcaccttccaaataaaccacctgtggctgaatccttaatttaggatctgcttctgggttagcccaaacaaagatttagttttaaatttatagttaattttaagcaaaatatatggatttctattttttgttccgtcaagtacagacactatatcttaattcttttttattttattttactttaagtcctgggatacatgtgcagaacatgcaggtttgttacataggtatacatgtggcatggtggtttgctgcacctataaacccatcatctgggttttaagccctacatggattaggtatttgtcctaatgctctcccttcccttgcccctcactccccgacaggccccagtgtgtgttgttcccctccctgtgtccatgtgttctcattgttcaactcccacttatgagtgagaacatgcggtatttggttttttgttctagtgttagtttgctgaggatgacggcttccagcttcatccatgtcactgcaaaggacatgatctcattctttttatggctgcatagtattccatggtgtatatgtaccacattttctttatccagtctatcactgattgtcatttgggttgttccatgtctttgctattgtaaatagcgctgcaataaacatacgtgtgcatgtgtctttagtagaatggtttatatttctttgggtatatacccagtaatgcgattgctgggtcagatggtatttctggttctagatccttgaggaatcgccacaatgtcttccacaatggttgaactattcagaacttgttatcggtctattcagggatttgacttctacctggtttagtcttgggagggtgtatgtttccaggaatttatccatttcttttagatgttctagtttatttgcgtagaggtgtttatagtattctctgatggtagtttgtatttctgattcttttcagtctaagatcagatatttcccctcctttctcttccaccttttctctacttttctatatgtatttttagttctgtcttcatttttacagtgtttacgttgctaacatttactttctgtaataacatttgaataatcttgagatttttttccctataagttgtttctaaaagttgaaaaccaataaactaagtatacattattatgcctttatatctatctagaattgcagggccaagtggttttgcctttccttcttcatgagttccatgccaagaatcctacatcactcaaaggaggatgtttctagcaccaagggcaaatagagtcccccttttacccaccattgatttctcacaatcatgtcacagtgtagtctgttttgcagtgcgagcttgattctcttgtgcagttttatttccctagtactcctcctcttatcccaggttttgctttctgcagtttcagttacctgcagtcaactgtttttagattttgagaaagaaagagaacacacttacctaatttttattacaatatatagttatactttttctattttattattagtttttgttgttaatctcttactgtccctaatttataagttaagctttattgtaggtctgtatagaagaaacagtatacataaggtttagtaccatctgtggattcaggtatccactggggttcttggaacatattcattgagaattagggaaaactactatatatttttttcttgtagagatatgtcaccacatcacagctatttttaaacttcttactgattctatcagttggtttcatcccagtctttcatgaatatattctttgtggagcctacttattttctgttctgatttgaagttttgctttatagacctactttacaactctcacccttgcatttcttttagttgcactttagggctcattctactgtttttttgtatatgactctttcagtctattaatttttattcttcttttgttgtggcacagccttaagtaatttctgtgaaaaagatattgggaaatttaccttctgagtccttgaattattaaaaatatgcttattttatctcagatttaataatagtttggttgggtataaaattctcacatacattaatttgagtataaaattattgtaaattaattttctgatagaaacttcaatacttttctgcattggctaataacacccagtattgttgatgttagtatgatcctcaatcctttgtatatgatctaagttttctgtctttaagcattttatattttcgttatatccttgggattctgatatttcataagtatgtacacagttctgaatcctttttcactcattttgctggcatgctgtgggccatttaaagatgaagattcagattaaattctctggcagcctttcttctgtcattgcatgtctttgataatcccctctccactacccccgtgccccggcatttcatctgaaactgctaatgctcagatcattttcctgaattgactctctatgcattgtatcttctctattatgattttggccattgtgtatttactctggattccagaaaattaccttgacattatttctcaacatttccatctgattttcaaaaccagaaaacatatttttaatttccaagagctctttcttattttttgttcatttttttagagcatttcattcttgttttgtagatgtgatataatctcaaatccttctgaggtcattaattagagttttttttttcttaatttcttctttggttgcctgaattgtgtttgtttcctctggcgttgtttagttttgtttgtttggtgcttctgctttgtgtagtagttagtattctccatattcttggtgatctgtttcggtgttcatttttaagaaggaagacatggatccatttttctaggtaacttggtgtgcacttttgctgctgtaagctgtgtggcttgggtgaggcgcctgcatgagggcagggctaactgactgataggcttcacattagagagaagaggcaggcaaggaggttttgggcctggggacccccaaatgccagaatgaggagggcatggccatgggtgcttttacacactctaggagtcctggatcctaactcctagaaagcgtgttcaatttagaaaagaaagctttgtcgtcgctgttgtctttctcttccccaggagccagaggtacaagctgggtgggcagcctgccctctttgtgctcagagttggaggaaaagtagggcagggtgtaagaaatgaatggtgcagtgggttgggagtacgtttttaattcctctcctcttttgcagtcctttttcctcaattgctcagccctggtctgctggctgaggagcctgtgtcctgctggcagggtggccctttccctgctgtcccctcctgtgccttctgagccaccgtttccctcacacagccttgttcatcaatacactccggccacgcaggccctagcattgttttttagaaacctctcatcttttgcttgttggtttccttactgttatcctttgatcttaagagatttttattccttgattcctccatgttcaaggtgtcttaggagaagaggaagacaaatagtatgccctgtctctatctacaatttgtcccttttttaagatttctactttgggttaattttcctggtattagaacaagtcttgcttttggccaagcccaggtatggggaataatttggtgttcctttcaacagatgtttcaatatttgttcatttgaggagaggtgtctgggaggggtgctggacagcagcagctggtggtggcttgacaggttcttggccatcccaggtgactgtgcctagtccctaactcacaggccccagcccacaaaacaaaagccagttcttagccagcaccatccgctctaggtagaagttcactgaccacctgtagttacctaagcttgactcctgggaactctgattccctacccctagaagcttattataaaaaatctcctttggccacactagatgagacatgctccggtgagtgcagttttcttcatgtgattctatttccagtggcgtttgggcatctctcatggagagctctcccattcacgggcacctctgtgcaggtgggtttccaggagagcccagctgggagcacaattcgggagagtttcagagccctccttctgtgcccagcagagccactctaagatccactggcgctgggactgcgcccactcttggctgcctttccaggccattcagcagcccattgtttgccacagccacactcgagtctctcgggctgtgcccatttccagcaactctgagcggggtcaccaattaaaggaggaaacaaaacgtttcctgagccggcggcctccggctggctctgcttcctgttgctgtgtgagtgcggggttctcgcgttgcccacggctcccaccgttctccgtgtgtgtccctctccacgtcttcattattcctcattagctttggtttcctctctccccctcccctttttacacgtctgttatttccaaccctttagccacacaaaatgaggggtgcccttttcctgtcgcctcgggagtcactcctccctctgccgtcacctgcggatgccaggccatggcactcggccacttctcggccacaatgggagctctcagagccgggcggcgcggcctgggccgggtgccaacatgccacagcgaggcagctcggcctgcagaggggcgtgagcctggcaatcagaccctcgcagagccgccaccgacttgctgtggggtctggggcaagtcacttgacctctgcttagctcctcgtcccggagaggaagtgaagatggctttcctgggacgctggaggaattaccaatgaaggcaggatgcctcctggcccaggcctagagacccactgccagcctcttggatgggtgattttgtgcatgctctcagacaaacacacatacacacacacacacacacaaatacacatgcacatgtgtagacacacatgcaagcatacatatattcatgcattcatatatgtactcatagacaaaaacataaatacatatgcacagagacatacagacatacatttacacacaaacacacatgaacaaccaatgcagacacacacaaacacatgcacactcagacacaaaaatatttccacacccacacaaacacatttatatacagacttacacactttttgtacacttatacacacagtcacagacttattcttacccaaaatatgcacatatacatacacacatttacacacagacatacacactcacatacaaatgcatgttcaccacatcaaggatacatataagtgtgtgtatatgagtgggtttcccaatgaaacaaatataaaccaaataaaatttcaacttctctttatgaaaacaaaacaaacagcttgaaatctctgggattttgcctgttcttttcttgttatacagcagtcaaaagtccttggcctgtgtgtgctagtcactgtgccaggcacagtgaggcatatgacaaacagctgatgtggcctcaggccttgagagacttatgggctattcggggaacacaagccaatgactcagggcactgacatgctaacacactcgggtagagagcttatgggagggtccagctgtggcacaaaagatggaatgttgcatcctgccagaggagaaggatcaaggagggctgcatggaggcaggggctcttgatttggatggccccgccagatcagggcagaccactcatttagctgggcttggtgtcagagccacaggcaatgactctgactccagacatgcatgtggaatgtgtgggaaagagcaaagggtcccatcaattcattcttctttgaagaggtggcttcaagtgcctgccatgaccacagtgggttgggggattctcagctacatctgggccaccgcaggcatcaaagctggagaagcagagctgactgcccctcgagcaccttcacacctagccttgctcgacactgtcagtgaactctttgcacgtttttcttctgtagctgtgtatctgtggtgatcgactgtatttttcaaaggcagttgcatcagtatttttgttccacatgctcttccagaaccttgcctcatctgcaccaagaggtagtgtctgtttccctccccttgcactttgttgcaagggtatggctttgttgactaccttggtgaatagaatgtgtgaccttggggctatgtcatggaaggtggtagggtttcctcatggttctctctttgggtcaagtgccttgggagcctggcacacatgggaagtccaactgccctgaagctgctgggctggagagaccatgtggagagaccacataaggacagagagagatgctggggtcagggaggaccccctgcttgtccagccccagctgttagcatctccccagggccggcaccagccatgagtgaggggctttctgatgactccattccagtctttgggctgcccagctgatgcctagtagagcagagatgcactcttcctacagagccttgtgcaaatggcatcttcaggaaccaaacaaacttgctgtgggcttaagccaccaagttttgtggaggtttggtacccagcaacagacaactggagcatcagttcaagcaaatgtttggtcatgtttgcccttaagggctgagacaaaccttgcaaaatcttggttactcttggaggtcttattcaaaaggcaaagtcttcacatgtggacttttaaaaaattgcactcctcctggaacactggagaggaaaagcccaaaagatccaaggtgcctctttacaagcaggtggctttatctaaacacacgatcatacaaaccacctgctgtcctgccttttcatgaacttggcttcttttctaccaggtgtagggaacacaaccattcagcataaacaacacttacattgggcttagaaagtctaatgaaatgaaagtgacaatcctggcatatttgggattagtctttgaatccgtatggttcattctgcaaggcaggctgacctcccacactagcaaagggacagacccttacagccagggatctctagaatggagagccgcctgttccatctgcttcatgatgcatgaagtaccttgaatgtgcctgctagtcaagtcatggaaagttaagagacagagagaggacatcttgacttaaaaatagatgtttaagtgcattttcaatccaccataggtgagcattttcataaaatacaataacaggctgggtgtggtggcttactcctgtaatcccagtgctttggaggccaaggagggaggatcacttgagcccaggagtttgaggctgcagtgagctgtgatggcaaccctgcacttcagcatgggctacagagtgactctgtctctaaaacaataaaaataaaaatacaatgcaatgacaatgaattactaagaaaatgaaataaaaatatacactaaaattcaagcctaaaattattattagatttaacagacctaaagttaccctgcttaattggtatcaaagtctctaagtggttgccctccaaatctccacccatctcactgcagatcagcacaaatcttcagtgcacaagctcaggtgcccaggaccactcactgactagcacaggtctagagagcaaacagaagctattttcaggaaggcagagttggaatgggaaaggtgcgaaggaaaaagccgtaaaatatgtgggacccaggtgtaagaagtaagagaagtgggctgtcttcagcaggggaagcgccaagacagagaatgttagggttccatacagactgactttgttcactctttgttttttagcctgaggttgatcttaagatcagattaagaaaatgtggcacatatacaccatggaatactatgcagccataaaaaatgatgagttcatgtcctttgtagggacatggatgaagctggaaaccatcattctcagcaaactatcgcaaggacaaaaaaccggacactgcatgttctcactcataggtgggaattgaacaatgagaacacatggacacaggaaggggaatatcacacactggggcctgttgtggggtagggggatgggggagggatagcattaggagatatacctaatgttaaatgacgagttaatgggtgcagcacaccaacatggcacatgtatacatatgtaactaacctgcacattgtgcacacataccctaaaacttaaagtataataaaaaaaagaaaaagaaaaaacactgaacaggaaaacacacacacacacacacacacacacacacacacacaaagagtctccactggagagagggtggacagggcatgaggatttgtaacttctggcattctggcagagactggtattagggctcctttaactgaaagcaaattctatttccagtccttcagagacaccaagtaggctccaaagagcctggccaagcacacagtcctcaccccacagtattcttcttggacgtttgaaccttggagttgcaggaattctgaggatgcttcagcgtgtgtgtgtgtgtgtgtgtgtgtgtgtgtgtgtgtgtgtggtgtatgccagctcagtatctagcaatcaacttccatggtggcatgacacttgtagcatggttgacagatatgtcctttccttcttggatagtgtctgttctaacacgtgccatttgggatcccttggaatcttcatgtacagaactggttgctgcctcgttgagtcggtggggacagaatagctcctggttgacagcatgggttgtgcagaaggacggatcctgcaggtaaatcacagcagatctcagccatgtttgcaagtatgttacttaaaaaattccaattctaatgcatttaagagttttcatgattcacgtcattttcacccctctttcattctgctgtgctttcttgcgtggaagggaaaagcatagccttacaattcacaggcatcacccactcctctctcaccattattgcatctcatggccctcaaatcttactgatgttttgttaccacttatagcaatttgaggttaataaagagtttcaaatcccaacatttttggggggagcctttataaaaatctcatatgatatttatgtcagtttaataaaatatgatgatacccagcaatttcactttcatcatttagaccaaaggaatatttgtacacatgcatgaggcagtatgtgaaaggaaatacattatggcaatttctggaaaaatacgaatttagaaatgccctaaatggccatcaaaacggggatggacagataaactcagattcattcatacaatgggatgctcacaagacatatctgtaagtgggaacatggaagtgtctcaagatgcactgttgaccgaggaaagcgatttccaaataatacacgcagcacgatagcattgctgaaggaaacagaacctcataaactacaaagcgtgaccacaggttttctaagggtacatacctcatagaaaataatttgtagtgcaacatccaaaacgatgacaatatctcctgtagtaggagaggaggaaaccgagagcagtggtgctcaaaggggatttttagtcttacttgtaattcttggagttttttttttaatgaggaaacattactcatgtcttatttatgtagtaataaaatcatgtcagaaatctgggtatactgatgagcatgactatcaccccggcaacgtctatctgagtaaaggccaaataaagacgagagaaagagacaagagcactcacagagcagtgctcaaggccagggcccatgactccaactgccagagcctctagctccagctccaccccacaacccaccctggctgcggcagccctcagaggtttcctgggcttgctgccagctgtggggttaggaagttaagagaatgaaccctggagccaagccacctggcttcccatttttccaatctttccaagcgatgcgatccctggggaagtcaggcacccctcagtgcttcagctcccttgagtgtcaagtgggtacaaaaatatgggggtgttatgggagttaaattaaatcatatgaccaaaatttagaatggtacctaggacagagacatctccaagtaaatattatctgctactattaatcttcaaaagcttttttttcttccctagaagtttctttagggactcagatgtttaatttccactaagaccaagccagctccaaagcctcctcctttatttcagatccttgataagtagcaacatgggaaggtttaaaagaaagtcaggtccaacatttccttgtatgaatggagaaactgaggcccagagacgcaagtctcattgctgatcctcccaggaagttagcagaagagctagcccagacgtcctccctcctgacccctctggccagctctgtgaccattggcactacacactcctctgacagaggaaagagcgggagctgagctgggcgccctggcttatgcttggaatcccagcacttcgagaggttgaggcaggaggattgcttgagcccgggagttcaagaccagcctgggcaacatggtgaaactccatctctaccaaaaatataaaaaattagctgggtgtggaggtgtgcacctgtaatcccaagctacctgagaggctgaggtgggaagatcacgtgggactatagtgagacatgaccacgcaactgcactccagtctgggcgatggagtgagaccttgtctaaaaaaaaaaggaagctggaattggcttgtggaacaacagaattgtaatttttctcaaaagactgacttattccactttggaaaatgggcaaaatactcctgcagctccggcaacattctatggggtcctcagttatgaccgtgacaatggtacagacaggctcgaccctgctggtgccacagagcagggactgtgggagcctgaagatgagctttcatggctccaggacaggacagagaggaggcacctctgcaggaggctcggagattgagatgtgctcattgcaggcaggcagctgtccttcccatggatgagagcagcccctctcttctgcaatattgaccagcaaagaaaacaaaaaccatcttcatactttttcagtagaaaatgaagcagtttatttaatattatttggataacaagcctccacatgaacaggattcgaatgtcagttgtcttaggggaaaaaagatttattggttggtaaatattgagaaagaaaagctgataaagaacagtttcagctgcggcttctgcccggagcaggagaacaggcctgtgttgtattttggggccctgggaaggcaaaaaattgtgaatgtctttctttgttggtgggtgtaaaagtggagcccgctacaaataatttcttatttcttgtcgcatagattttaaattatgtagcttccctaccttgttaagtattaaagcggtcttgtttaaggaagagacacttaaataatgaagcttatgtatcttgttttcagacatcaatatctggctttgagtggcacaaagaaataaaggaatgtggattcagacctcactgggatgcttggcaattctaattctaccccagactgcaaatggacacacaactgttgtgacttttgttgaagaggagaaggatgggtgagcatgtgacgttgggaaattgtattttcttcttcgagttcttctgtttccgaatatttaatcctactgttttcttctttagtgaaggtctctttagtcaataatctctttgctgaaattgcttcgggcagcacagaagctggattcagaagcacacaggtctggggatgcaggcttcggccagcctgatgcaaggaaagactgccatctcgtggtcagctcaatcctggcaccttggtgagggaccaggctgcagaaaaccaggcttggggaggaaacggtgctgcaaactggatttctgccggacagtgtggatgcccttagaaaacacccagaaaagagctgagtgccccccaaggtaggcttcagtgaatcctctgcaggtgtgttgtcatcccttgagccaaacacatgcttcacacacacgctgcaggctgcgtgaaaatgaggtagaaatgtggggaaaacataatcccatggagagaacaaagagctgaacacgtaaatgcctccggcgtgcctggcagagagaacactcaggctgagagaagggacagtgacttgtaccaaaggtaggcaagtagcctctggggtctcaatcagcagggcatctggtcaacccttcagacaaagtcaggtctgagcaggcaagatccatggatctgatttattaatatttttacaattaaatagaatctgattgtaaaactgttacatgtgttgtaagaaaaaaagaaaaaaaggaaggatatagaaatgtacaaagaaggaaataaaagactggaagcgtcctcaccttagggacccattattaacgcttaggtggccaatcttccagacatcttgctacgaatatattcaaacgggaattaaaaatgtacttttacacaagtgcaatcagaccttgtactcctctatcccataacctactttttcattcaacactatgacagaagcgtctttccaggtccataaataaaggtaggcctcatcgttttttatcaattacataaagctaatggtatataatactgatttcatacctgctatatgccaggcacatacatggtcttgcataatctcataatgactctacagaacgggagtttgtattatgcccattaagcagatgaacaggctgtggcacaagaaaattgatcagcactgccagggtatctgacctcagagcccaggatcttgactagtaggctagaaatgaacataatttacttaccagttttccagtgatggacattaagccatttcctacttttctggtataaaaaataagattgcagtgaaactttagggcatatacatctttgcacgttagtgagttctctctaagttaacctgaaagcggtgggctgtggagtttgtgggtcaaagtgtatgctcgatttatgctttactatgtgcccgacttccctccaggcagcatgtgccagctcacactcccaacagctgcgcaggagaatttccagtgccccacgaccttgtcaatactaggcttcctcatcagttttttctctcctttatttttctttaggaaaaaaaaaacagcctttgaaaaaaattgtacgaacaagtgcaatgtgtgcttgtaagtgcttcaccaaatgtagatccacccggtgttaaccttttgccacatctgctctctattagtttttatcacactttggaattatctatagacatcataacacttgatgcctaaatgctttggtgtgtgtctcttaagaacaaagacacacccttacctaagcataatataattggtacacttgggaattgctaaaatacattgctaaaatacagttttctaatacagaatctatatcaagtcattgaataaacacacttcttgacttaaaatgagattacatcccataaacccataataagttgaaaaaatgtaagtaaaaatgcatttaatacactaaatctgctgaatattataacaattttgcctacattaaatgtgctcagaacacttacattagcctacggttggaaaaaattatccaacacaaagcctattttataataaagtgttagatatcacatgtaatgtatggaatactgtactgaaagtgaaaaacagaatggttttatgggttctcacaatacggtttccactgaatgcctatcacttttgcaccattgtaaaactgaagaattgtaagttgaacaattgtaagttggggactgtctgtacttaacagatttttgtcttgatccagaatggaatcaagggtcacatattgagtttcgcagtcatgtctcttgaatccagaacagatctccagtctttttgtggtctctcatgacattggcattttgaagagttttatagagtgtacttagacctggatttacctgattgagcctcaggattagatttagcataaatattgttggcaggcatattatatagatgctgttgcttccttctcagggcgtcatatcaggaggaacaacaagatgtcaatttgtccacaatttgtgacattaactttgatcactcagttaagtgagtgtctgctatatttctccattggaaatgtaccctgatcttttgtgattattaagtgacctactgggtgatactttgagacagaatatcgtgcttcccagcaatctcttacccagtgattttagtatctattgatcattcttgcctggatcagttgctgttttgccggctataaagtgctctttcatttcccattctttctacttttaaaaaaagttatcactcttctataaagaaaaacttcttatcctatccctcaacttttttagtatcagattgtactcaaggcttctttctctatccagtgtatttctgtaactatccattttgacagccagatcatcccaaatttggcaagtggcagccccttcaagctggacctgtgtcctctgagcccctctctgctctctggcacgagatgctccaggctcatcttgcattttccttgcctcaggcctggcatcagccatttctccaggagccctcccatctttgtttatatatttattaatatttaatctctcttattattattagttttaaaatttatataaaataaagttggcgttttttgtgtagttgtaggaatcttaatataggtataggtttgtgaagccaccactgtaattgagatacagaacaactccaaatcatcaagttacacaccttaaatatatacaatttttaattgtcagctatacctcagtaaaactggggagaaaatatacagtttcatgcccagaagctactttgtgcttcctgtttgtggtcaaacacatccttcatccctgacagctgctgaccttatctctgtcttcatagttttacctcttctagaatgttacaagaatgagatcgcacaatatgcagccttttgagtctggcttctactttcacttagcataatgcctttgagattcagctgttgcatgcatcaataattcgttcctttttattgctgagtggtagatattccatcatgtggatgaaccacggtttgcttatccatttacccattaagacaaatgggttgtgtccagtttttgttgattaagaatagagctgcataaacatttatgtatagggttttcttgcatgaacgtaagttttcatttctcttgggtaggtgcctcggagtgggattgctgagtcacacagtaagtgtatgtttcactttttaaaagctgtcaagcctcttccagagcagccaagccagtctgcgtttccaccagcaatttctgagagttccagttgctctgcgtccttgccagtgcttggtattgccaggttttttattttttaacccattctaaaatatgtttagtgccccccattttttttatctttgtaaatgttataggtgaattttaaaagtcaatctcaatatatattggctgttaataatactattaatacctattactgttaataatgctaataagtaactatcaaatctcatagatgaaaaagatgatttatgatctttaaaattttgcatttttattattaggaaagtcagaagggctcaattttaaacagagagagaagcggatagagaagtgtgttcttgcctgaaggtgtctttcatcttgggctgcctctatctatttctgggatcactggcggcccttgtactcctatcctcagctctttctgtaggctttttcatttcattgaggacatggatgggaaagaatgtccagcccattctctctccctcttttgattaaaaggaggggaggcagaagtggaaagggcaaaaccaattacaggttgtagcgtacactatccaaagcaatgtatacattcagtgaaatccctatcaaaacaccaatgacattctttagagaagcagaaaaaaataatcctaaaataatatgtggaaccacaaaagaccaaaatagccaaagttgtcctgagcgaaaaaacaatcctggaggaatcacattacctgacttgaaattgtactacagggctatagtaaccaaaacagcatggtactggtataaaaacagacacatagactaatggaacagaatagagaacccagaaataaatccagacatggtcagtgaactcattttcgacaaaggtgccaagaacatacactgggtaaagaacagtctcttcaataaatggtgctgggaaaactggctatccatgtgcagaagaatgagactagacccctgtcactttctacccacaaaaatcaaaccaaaatggattaaagacaaatgtaaaacctcaatctacgaaactactaaaaacaaaaacaaaaacaaaaacaaaaaaacattggggaagttccccaggacattggtctgggcaaaaatttcctgagtaatactctaaaagtacatgcaactaaagcaaaaatggaaaaatggggttatatcaagttaaaaagcttctggcctagcgtggtggctcacgcttgtaattccagcactttgggaggccaaggcaggtggatcgcctgaggtcaggagttcgagaccagcctgatcaacatggcgaaactccatctctactaaaaatacaaaaataagctgggtgtggtggtgcatgcctataatcccagctactcaggaggctgaggcaggagaatcatttgaacctggggagacagaggtttcagtgagacaagattgctccactgcacaccagcctgggcagcagagtgagattctgtctaaaaaaaaaaaagtttctgcacagcaaaggaaacagtcaacaaagtgaagagacaagccacagaatgggagaaaatatttgcaaaatatccatctgacaaaggattaataaccagaatatataaggagttcaaacaactcaaaaggaaaaaattctagtgattcaattaaaaatgggcaaaagatcggaatagatgtttctcagaagaaaatatacaaatggcaaacaggtatatgaaaaggtgctcagcatcattgatcatcagagaaatgcaaatcaaaactacaatgagatatcctctcaccccagttaaaatggcttatatccaaatgacaggcagtaacaaatgctggcaaagatgtggagaaaagggaacccttgtacactgttgttgggaatgtaaattagtacagccactagagagaacagtttggaggttcctcaaaaaactgaaaatagaactaccatatgatccagcaatcccactgctaggtatatacctgaaagaaaggaaatcagtgtattgaagagatatctgcattcccatgtttattgcagcactattcacaatagccaagatttggaaacaacccaagtgtccataaacagatgaatggataaagaaaatgtggtacatatacacaatagaatactatgcagccatagaaatatgagattctatcatttgcaacaacatggattgaactggaggtggttgcactaagtgaaacaagccaggcacagaaagacaaacttcacatgttctcacttatttgtaggagctaaaaattaaatcaattgaactcatggagatagagagtagaaggatggttgccagaggctgggaagagtagtgatggtgggggtagggtagtggggaaggaagtggggatggttaatgggtaccaaaatataattgaacgaaggatgttctgtcaattgaataattgatagaatgaataagatctcatatttggtagcacaacagggtaactagtcaataataatttgattatacatttaaaaataactaaaagattataactggaatgtttataacatgaagaaaagataaatacttgaggtgatgggtaccccatgtaccctgatgtgattattacacattgtatacctatgtaaaaatatctcatgtaccccataaatacatacacctactatgtatgtacccacaaaaatttatagagtgtggttatcagagcatggagtcatgttcctacatagtgcttaaaacttccactaggaattatcatgctcaattcagcttgttccagctctagaaaaacaagagtatcagctaggctgtaggtaccaggctgcacttctgacaaataaacaagaccctagccttgttttcaagaagctcattctagtggagacagggtgggaaggagacacagacaaaaccagccatgggggttaatgtgtcttaacaaaatgacacataagtctgacccaggaagaaaaggagatagctttcagaggccagagctgagctctgagtaactgtggctgccggaaactgcctcttcctttccagcactggctttcccaacctgaaaaactggttcagtctcacatgtggatcctgaggacatttaaagaagacattttacagccgtccagggaactctgatgagatctgaaatgttctgttggttctgcagctataaaataacctgcctagcacagaaacatatagcaaccatgcctgaaagaatgaatctggcttttgaaagtgctcaaatagaaatctgtttactgagcaaagccatcatcctggctgacttacagaaaattgatagcaccattgtccaagattcatgctgtctcctggcacatcagagacagccctggggcacttgatatctgaggtcattttcttggagttaagggacactgtccatgggaaccacaaactgcactggtccaaacatttggtcaatgcagcatacatacaaagcctgattcatctaggaaagccaccttctcatcctttggcaatgtgtcagcatttatgtagcggggactctttcttcccagatttttacctaatatagagctttagtggtggttcatagtgagtgctttcatcagtcaggagataaaaccataccttttaacaggcataattttatataaaaattgttaactgggttctttcgcagaaaggcaaaaagagaactctaagaaatcatggtggtggcaactgcaggaaatagctacttcccctaggggtgatgaaatagaaggaagaacagaaaactattaaaatgtagaagctcagaggaggggccccatggagctgggactaagatatctgagtgaggccgcattgaaactgggtctgtgtatactgtaaaaactgcaaactggatggagtcactgctacaggaaagaacttccagtgcctgggttatcattgaggaagtgatgcagacaataagaggaagtattcaggaataggagctaatcagaaacatgaagtgctcaggaacaggaagtattcaggagcaggaagtactcaggaacaggaagaagagggccactttcccttccccagcctcacggtctccttttactactcactcttggtggatcccaaggagcagctggctgggcagaatggtggatgcagagttctagccctggcattacaaagctgggtagaaaaggataagtttggagcttagagataatagctcaataactggcaaattgttcaatagatatttttgagtgactggataattttacatgcaataaaagtccaagctttgactttcattcaaaaatttattaacattcctgggattgctttctcatggggaattctcatttgtgccagactctctctctctctttccttccttccttccttctttgcttacttccttcttttcttttcttccttccttttcccccttcttcccttttccctccctccctccctccctctttctctcccttccttccctcccttcccttccttccctcccttcccttcctttcccttcccttcccttctccttccttttttccttcctttcttccttccttccttctttcctttctctttcttattttttcctttcttccttcctccctccctccctatctctgtgtcttgtttcttttctttctttgtttctttctgaaatttggcctcaatgaaacttctgagacaatttagcatcctcaattgttttcactgcctccgtctctatgttctgaccttccccatgtctgttctggggtattgcaggtttctgtgacagtgacagaatgtgactgatagcacctcttggcccatggaatcccagaccaggactcagagccccacatttcttatccttggataaagcatatgacttctttgaggctcacttttcatgaaatgggaatgagaatatggtcttcacccatcttacatagatgttattaagatagaaatgagacataaggctgggggtggtgggtgacacctgtaatcccagcactttgagaggccaaggtggggtgatagctggaggccatgagttcaaaaccagcctgagcaagaaagcaagaccccatctctacaaaaaattaaaaacttagctgggtgtggtggcgtgcacctgtagtctcagctacttaggaaactgaggtgggaggatctcttgagcttgggaatttgaggttgcaatgggctgtgatcacaccactgtatttgcccaggtgacaggtgagactctgtctctaaattaaaaaaaacaaaaaccaaaaaacaaatgagatataagatggataaatgaattaaaaactttcctaggtgaagtttgctgattgaacatatgtctctgcatttttctcctcctaaagtcccactggaataataacaagcaatggattgttttgaaaaaggcaaaaccgactacaatggaaaaaatgggagaagaaatgacaacaacatggtttgggagttggaatacagacagatgagtggtaactgatgaaagaaaacaaagctcagaaggccgtagtggggaaaattataaaacagcagatgtgtgctgcaaattccacaaaacttgggaactaggggcagcaggtacctctgaaattgggggtaaggcagaaagactcaaataagaaggatgtgtttagcaagcactcagatctctatgtcttcaccccactgtgggcagccaggccactgcccacctctcttagcaaagactggctggagagggtaaggcatggtctctggacacctgggctgtgcactgcagcagtgcgatgagggacagctggatgctgacgagcctcggcccgctttcctgacctggctcccaggatgctgcagtcagtcttcaccttccagtcaggagacctggagagtgttctctcgggagtctgtccagccaaagaagaaagagttaaaggtactgaaatcagcagtttcccagaaacatggcccatctggagtctcctacagtggagctgcagatgctgagtgtggttcttgcactctgatcttccaattagcatttagttccttactctgaaatgctagcagaaaactaagagttactaatgggattcatttcctatgactactataacgaattaccatcaacttggggcttgaaacaatacacatttattttcttgcaggtctggaggctagaagtctgaaatcaatttcactgtgtcaaggcaaggtattggccaggctggttcctgctagagagtccaaggaatatgttcctttgccttttccagcttctggaggtgcttagatttcttggcttacggccccttcactccaatttttgcttctgttgtcacatggccttctgtctctgttgatcttgcctccttcttttaaggaccctggtaattaagtttaggtcttgctgagataatgcaggatgatctcctcatctgaagattcttaacttgatctgaaaagttccttttgttatatacaagtcctggagattagggcatgggaagcccattattcagcatatcacaactgtctcatgaataatcaggatttccttgaaagtaagcctaaggcctccagatggacatagaatcatcctattatgtaccactttgagggggcggaattaagaaaatagtcacaaataattttctatgatctgtggttcaaaagaagaacctagttgagaaagacagacttagaataaaataaaggtgaaagtaatcagacagaagaggcacagaatagttaggaagaagacactctagaaacagactattaatactttacggcagtggcccgcaacctttctgacaccaggcactggtttcatggaagacaatgtttccactagggggattgagggggttgggggtcgggatggttttgggatgaaactgttccacctcagatcatcaggcattagattctcataaggagcacacaacctagatcccttgcatgtgcagctcacaatagggttcacactcctatgaaaatctaatgctgccagcgatctgacgggaggcggagctcaggcagtaatgctcattcaccagccactcaccttctgctgcgtagcctggttcctaacacaccatggacctggcttatggcccctggtttgcatcccagggattggggacccctgctttggggagataagaaaataaactgcaataatcaaaagagaacgagatgttataaaaaacgttcagagaatacaaataaactcttggaaatgaaaataacatagcagcaaagaaaacctcaaaataagtttccagataaagttgaggtattcttacaaaaaacagagcaaaaagaaatagatggaaactagaagagaaaagaaaattagagaacgagtccaacagacccaacatctgattaatagaagttgcagaaataggattaaagaatacttatggaataaaataataaatggaaaaaattcaaaaaactttccaagttttttagaacataagttttcagattggaggggtcccccaagtttctatcataatgggtgaaaataggcctatgacaaggcacatcatcactgtggtcaaaaagaagaggtatatctatctatatctatagatatatgtatatctatctatatctgtagatatacgtatatctatctgtatctatagttatacgtatatctatatctgtagatatacgtatatctatctatatctgtaggtatacgtatatctatatctgtagatatacgtatatctatctatatctgtaggtatacgtatatctatctatatctgtaggtatacgtatatctatctatatctatatctatacctacatctatagagaggcttataaagaacctaggattaggaaggctttgaagttctcaatgccaactagaaggcaatgaagcatgctttcaaactagtgaagaaaaatgatctccaactagaattctactcccagctgaaccaccaccaaaagctattcaaggtgtgtgttccatcaaaattacagagtaaatccaaaaaaggaagacaagaggtataggaatgagaagttccaacacaggaggttaccgagtggcagcagactctggaaaagacctgttgcatttggctgtgcaggatgtacactgctcaacttctgatcatgccattcttttcattttctctgtggatgacatagaaatagagagaaatcaggacaatttagagcccctctgaaggctcctggggagacctccttaggaaattaaaatcaatagaaaacctcatgcagtaagaagaaatttagacaattgatagcatttgtgattgagtgaacgataaatacacagaaatctaagcaaatcaaaagaaaacaatgattaactttggagtattaataactacaaaaattaaatcataataagatctgaggagtatttacatattcataataattcaagcactgatgatttatctctaactacaaattttgaaataattatgttgggagagccagggttatgggaaagtggcgtgtgtgcagaggggtgatataaaagtcaagatgtagcaataaaaacatattcttcaagaaaggttagcatatgccaaaacagtcagctaagatccatgaagggggctgatgagtaggggcaatgatattttataacaaaacttgaattgttacgctctttaaactgtatgtatttgtaactttgctaaaaatagaaactagtaaaagttttaaaagttctttcaactctgggaaagtcatttaatctctcttagcctcgattttatctgggtgagtgtgcacaggggcatatgtgtatcactcctggcacagctgaagtgcagagtgaaggctagtgttacacatgtcatcagcatcattgtgagctgatgttactgccatagagcttgctatgcacagagttggtgtttgagtcagagcagcaaaactgagtccccggtacacatcatttaattacctgcacctgtgctcccctcttacttctggcttgccaggaattgcttacattgacactggcccaattgtcccatgtaactaatgtttatggtttcttttaaataaacatagaaattgactctcccaatcttaaaacttgagaaagttacatttgtcttacctgagtttcttcctcaggaaaccaataatcaggcctcccagattatatcaaggacctgaaactcatcagatcactagatctggacaatgagatgccagaccacccccccacacctgtcatgactgcctgaccggccacctgcttcctgtggaccagttcctctcccctaccctccctaatacctattttcccacacatggttacatttcttccttgctatataaacccctaatttaagtcagttgaggagatggatttgagattgatttcccatttcctcagctgcagcactgaattaaagccttctttcctggcaatactcatctcagtgattggctttctgtgctgcaagcaatgggacctagaccgaaactctggtgttttggtaacatcagaaggagaggttatgcccaggcgtgcatgatggttgaggccagagttggggatcctgtccattcccatggctgggaaaagaagctttctggtcttggagaggaggcaaatctttagctcttggagaaacattagagataacccacgtggaagcaatggtgccagtagaccaaggcaacacagctttgttcagtgaacaatgacaatgaggaagtcagtcatttctaacctgggaacagctggcagcaacctggtacctgtctgagctcatccctggtgctgaggtctggagatgcagagattgttctggatactcttttagaaatgtgggctcctaaggacgtgtcagggatcatctcccccggtccagaccaggaagggctctagaccaaagggctctgggacaaaagtccattctcctaatcagactccaagggccacaacagctgagaaagggcggtctggctgtaagtagagcaagctctacaaacacgtgcgaaggaaggccgcacttccctgtctctctctcccaccatctggaaagctggtgaatatttcccatcatcatcatctctcatttctatctttgtgtgtccttaagtaaccacattgtattgtgagggagtgtaaggaacatgggttcaaaattttgaaacaggaagactggattcaagaatagcccatgttatccctgactgtgtgattctgtgtaattttatctctctgagttttcatttccttgtctatggaataggggtaacaatcgcttccccagctactgcaaaaggtttaacacagcttaactaaaaggtttgacaaagggcaaatggtacagcataggtcaaaactgctttgtaaggacctgagaggcaggaaggaaaccagcatttatagagcgcccagccagtagcaggtgcacggtagctacggtgatacctgcccttgatatatattctcttcttcacattgatatgggtgctgtaagtgttaggactttttctatggagcaagaaactgaaggtggcagggagaataactgcctaagtcacatgtgagtggatgtgtgaatgaggtcctcaggatgtcactggctgggtgctggggcttcagtaatgaacaagccattatatcccactggtgggaaatgaaaaataaagaagttaataaataaaccagacaagtatagaaaaaatactatgcaaaaaataaatgagtacatgtaagatggggctgtctcacactaaggggtcaggaaggggctttctgaggaggtgatattggcactgagacctgaacaaccagaagaatcagccatgtaaggattgtggggaaaggcatcccaggagacgagaagagcaaatgcaaaatccccaaggggtattgaggtgtgtgcatatgaggggcagagaaaaccaacacagccgccacactgtgagcaaaaggtagggagaggatgttgtagaagatgaggatacagaggcttataggagcccttctgggccttaaaggtcacagcaaggagactgatgttcatttgaggtgtgttgggaagacactggacaggtctaggcaggggctgctctgtctggtttgtactcttggtgtggtcattgttacatggttttgtgtttggcggctccccaggctttgtttccattaacatcaagttgctgggagaaatcgcacagctgggggatcctcctctccacccatggtttcagcacttgcctgccacccctaaccaactttaggcattgggggtggtgttggggtgggggtggctgtagggaaagaaagagtcagggcaaaacccctaaggcaaaaagaagtgctcttcttccctgccagtagtgaaccaaccatcaaagcagggagctggtgatcactagagaaggcagtcctgaaatctttggcaacaagcaccaacaagcaccaacaagccatcaacagcctagcagttctgttgttgtaaataaagaccttctatccttctaccaactggggtgggcttttttggccaataacagacacatggaatttcaggacctcctcaaaaaatactttcattgatctacctctgaggacaaataaataaaaaatataaagaaatattgactgagtgtggtggctcatgcctgtaatctcaacattttgggaggccaaggtgggaggatggcttgagcccaggagtttgagagcagcttggacaatgtagtgagaccccaatctctacagaaaaattaaaaattagctgagtatgatggcatgcacctatggtcccagctacttgggaggcagaggtgggaggattccttgatcccggaggtcaaggctgcagtgagctgtgattatgccactgcatgatcatggctcactgccctccagtctgggcgacagtgtgagaccctgtttccaaaaaaaaaaaaaaaaagaaaagaaaagaaagaaaaaagaaaaatattaataaaaacatttttgcaaggtaattatttggtaaaatatgtatttctacataataattgatacatatgaaagactctaatatatttcattttgaattgatgaagcattgtattaaaataaacattgaacccaccatccaccttgagaaagtgtacattactaaaactgttgaaattaactgtatgtatctccctgattccactcacttaccttccctggaaggtaacgtctacattacattatttggaagtacaaaatttatttttccttcttccttttctaaagagtttccttccacatttttgttttgaaaatttttaaacctacagaaagttgcaaaatagtaaaacagatacaaatttactcctcatctagattcaccaattattaacgttttgctcaatttgtgcttagttatctatcatctatctatctatctatctatctatctatctatctatctatatctttctttctttctctctctctctctttctctaatcttttctgaacccatttgagatgcagttatgcacacataacctttgatctgcagatgctctaagaccaaggatctttgcctacaccaaaatcaggaaattttgcattggaacaacactgttatctaatatggtatatattcaaatttccccagttgtcccagtatgtgtccttaataaccgttttcctgtgtgtttgctccaggatccagcccaggttcacacattgcatttgctgacttatctctttagcctcctctattctagaacagttcctcagccctttcttcccccatggcattgacaattttgaaaaccccaggctgttatttttggaatgttcctcattttggatttgtctgattgtttcctcatgaggaggttcagattaataaaaattcaaagcccctttaaaggcttcaaactgaatgaaatctgctctcaatttgcttcgacaccggggacgctattgcacaggggaattgagcctggatggcatagtccacctctggaacagatttcagctaagctgggtaaggctggtagctgagttgtcagcctaacactccaacagagctgacaggaactgtagatacccctgttacaccctgagttaagtctttatttccagttcatctctgcagtgggccttcccaacccagaggtctgctctgttccatgcagactgagattatcttccatgaggaatcgctgagatatgagaggaggccctgggtgccagtgaggtggactcgatggctggcagatgttcactgcactggctgctggcacagaggccagcaaagtgaaaatgcatgtggagtcccagtaggcaaaaagcaatttcctgagctgggccttggccaggaggctgcagttttacgcttccctgcattcaatggctatggggaggctgacggcaggacttgagcctgatgcttcatttcccaaggcccagccttcaggagccctcatgtcctgcacaggcaagaggcagttcttcacctcctaaatgtgcagggcctcagcagtgctccttggacgctgctcatgctgatattaaccagccccaaatgcatgaactcccaggaggcttgggtttcctcatgaggtggcacaatttaactgtaggcctagtcaagtggaatttttcacacatttatttcccctctgaagggcttgcatgtatagccacatttctctccatctctgagaacggctcatggggaagtgggaagcagaaatggctgcagggttgcttgttttgttcctggcattgggggtgtggactttccacttcatctcccctcttcctagagacaaggcatgagacactggcttcaccacgatgaggctgctgagacagaagcaggaaaacaggaaggccatgggctccagagccgggtccattcactgctgtgccttcccatggtttaaccttttccagccttagtttcctgaactgaagaatggggatgacaacactcacagggctgccaagaggatggctgtagacacccatacatggatgctgtaatgtcagacactctagaatgtcacttggttcttagcctgggatctgctgagagtccctcaaaattctgggagtagaattcaagagaataatataattgcacctttattaacacggaaagtgatgcacagcttagcatttccttcaattctgtggacaacaactcgtggcagtgttagtagtacctgtgactgtcatcaatagaaaccatagatattttcatattacattacagttttataggcatttcaaaactttatttacactcatcgtgacttcaaaatcatgttaacgtttagacatacagctagatcctgctatttagtgtgccaattaataatcacagatattagcatatcataaatttgttgtaagatattttgataactgtagttcagtataagtggtttcctttgtactcctgtgtattttacttaatgtgcttacaagcattttgagaagggattcaagggctttaccagaagtgtcctgtgttcaaaaaatggttcagaactgctgctctagctactcgggctttgggtagtaactttcctttctcaggggctcttgctgggtcctggctgaagacgtgaggtggctttcttactcataatttcttcctttgctgcccttctgaaaatggagatagtcagtgggaaggcaagggccttgaggggatctgaactgttccccagtgtcttcagattggtggatgacagacaggcctgccaagggcaatcatatgtgcaacaggacatgcatgaagtatcagagttgttgcccagattataccagaaaagtaaaaaacaaattgagctgcaggtcaaattgaggaagcaatgactctcttctcttctgcaatgaggctgagaattagaaatccctgctgggtgcagtggcttacgcctatagtttcagcgctttgggaggccgaggtgggcagatcacctgaggtcaggagtttgagaccagcctggccaacatggtgaaaccctgtctctgctaaaaatacaaaagttggctgggtgtggtggcgcatcctctaatcccagcgacttgggaggctgaggcaggagaatcactggaaccaaggaggcggaggttgcagtgagctgagattgcgccactgcactccagcctgggtgacagagcgagactctgtcccccccccaccaaaaaaaaaaaaagaattggaagtcctcacagtcatgagctaggagatccaggaatctgcctcttgaattctgggaaatagggatgtgaagctggaggctctagtgaagcctctcaggctactttctcttggatgacagctttgaccaacagacagagaagtgcatgatcgccaaactacaaagctagacttgtgggccaacttgtcatacgcaaatccaacagaatgtagagacaggagctccaggaagaaaagcaaataacttctaatctggacacgggtcgaatcatgccttctaatggtgcagcactgggcaagtggcttcacctccttgaccttagtattctcctctataaaatgggggcattggggatcatgtctacctctgaggatttaatgacagcatataaatagagcctggcaagtggcagaaccatgatatatgttcagcattgttagttcttgaggtgggtaactgttgttttttcccaaccaaactccatcttcctcttgttctggtgacagtacctggactttcctttagaaaatcaccttcctcagttctggccagggcaatcagcaagagaaagaaataaagggtattcaattaggaaaagaggaagtcaaattgtccctgtttgcagatgacatgactgtatatttagaaaatcccatcgtctcagcccaaaatctccttaagctgataagcaacttcagcaaagtcccaggatacaaaatcaatgtgcaaatatcacaagcatttctatacacaaataacacacaaacagagagccaaatcatgagtgaactcccattcacaattactacaaagagaacaaaatacttaggaatccaacttacaagtgttgtgaaggacatcttcaaggagaactacaaaccactgctcaatgaaataaaagaaggcacaaacaaatggaagaacattccatgctcatggataggaagaatcaatatcgtgaaaatggccatattgcccaaagtaatttatagattcaatggtatccctatcaagctaccactgactttcttcacagaattggaaaaaactactttaaatttcatatggaaccaaaaaagagcctgcataatcgagacaatcctaagctgcctcagaacaaagctggaggcatcacgatacctgacttcaaacaatattacaaggctaccatacattacattaatattgtaatattacaatattacaaggctaccataaccaaaacaacatggtactggtaccaaaacagatatatagaccaatggaacagaagagaggcctcagaaataacaccacacatctacaaccatctgatctttgacaaacctgacaaaaacaagcaatggggaaaggattccctatttaataaatggtgttgggaaaattggctagccatatgtagaaagctgaaactggatcccttccttacaccttatacaaaaattaactaaagatagactaaagacttaaatgtaagacctaaaaccataaaaactctagaagaaaacctaggcaataccattcaggacataggcataggcaaagacttcatgactaaaacaccaaaaacaatggaaacaaaagccaaaatagacaaatgggatctaattaaactaaagagtttctgcacagcaaaagaaactattatcagagtgaataggcagcctacagaatgggagaaaatttttgcaatctatctatctgacaaagggctaacatccagaatctacaagaacttaaacaaatttataagaaagaaacaaccccatcaacatgtggacaaaggatatgaacagacacttctcaaaagaagacatttatgcagccaacaggcatatgaaaagatgctcatcatcactggtcatcagagaaatgcaaatcaaaaccacaatgaagtaccatctcacgccagttagaatggcgatcattaaaaagttaggaaacaacaaatgctagaagggatgtagagaaataggaacacttttacagtgttagtgggagagtaaattagttcaaccattgtggaagacagtgtggattcctcaaggatctagaactagaaataccatttgaccgagtaatcccattactaagtatatacccaaaggaatataaatcatgctactataaagacacatgcacaggtatgtttattgtggcactattcataatagcaaagacttggaactaacccaaatgtccatcaataatagactggataaataaaaggtggcacatatacaccatggaatactatgccaccataaaaaaggaagagttcatgtcctttgcagggacatggatgaaggtggaaaccatcattctcagcaaaatatcacaaggacagaaaaccaaacaccgcatgttctcactcataagcgggagttgaacaatgagaacacatggacacagggagtggaacatcacacacaggtgtggggggaggggggagggatagcattatgagatatatctaatgtaaataatgagttgatgggtgcagcaaaccaacatggcacatgtatacttgtgtagcaaaccttcacgttgtgtacatgtacgctagaacttaaagtataataataataataaaaagaaaatcactttcctctatgtgttttatgtggaaccaatgctgcctaaatcctgcagtgcatacgcaagttggtgttggccaaccagagcatccttactgctctacaccatgatagatttagggttggcccatcatcaggccagattcgtgagaactccatcctagacttatactagaaccgtcaaggaaaaatagtcctccttgcactgaggccactaatcctggcactgcagacatcattctcagccctctaaggatacaacccccctaagaaagcagaactgagagatggagatggcatcatttgagctcctggtgcctgaagctagaagactgctggaatttttagttaagtgagcaatatatctcctatttctttgagctaatataagtttggcttctgccctttacagttacaagagcattgcataattccattcatttttgtctccctctctatggaaagagtggctaggatgggttaaaaccggtagtcaagaggacaagtagcagaggtgaggaccaaggggatgaactaggggattcttcctccacccccagagataagaaggcgggctcggaaagctgcggtattcaccgccactcctgcctgtctgtggctgagtgtgtcactaggggtaactccccagcacttccagggagaatgccctgatgcagtgattccggaagccaagaataagcacagggacagttcccggtgggagatgtggcaggcctggcagagactggctcagaggtcacagcactgtccaactctgcttcatctctctcttaaaaaacccaaacaaacaacactttattgagggatgattaacatacaataatctatatatatgttattaaaagtttttatttttgattttcatgggtacaaggttgtacatatttaatgcatgcaacttggtatgtgtggagataagtatgcaaggtgaaaccatcaccacaatcaaggccataaccatatctatcacctcccaaattgtccttgtcccctttttatttatttgtttttgtgataagaacacataacacaagatctatcctcttaacgaatttttaagtacacaatacagtattgctggctatggacactctgatgtacagtaactctttaggacttactcatctttataaccaaaaccttgtgccctttgactaatacctttctcttttcccctcccctcagatcctggcaaccatcactctactctttgcttctgagtttaattattttagattcctcatgaaagtggtatcttgcagtaattttccttctgtatctggcttatttcacttagcgtggtgtcctccaggttccttcatgttgctgcgaaggcaggatttcctcctttgttaaggctcttttgtatgcatccgttacatactcatactctgcttcgtctcttgaatgctgcctcccaagatgctcattttatgcatgccctcttccctcaatcatgcatcttctctttgcccacttctcttaaagtataaatctctctcgtccccatcaaaacttggctatctggtgttccagtctgctaacattcagctagccaaggtagcactttgtaataaaccaggggttccaaccacacaccagattttatattgaatgaccctaatgcttaaaatggataaaagtggagctgcctgtcggagggccagcaggctccacgtcctgtgtgcatggcctcactggcctgctgtgtgctggtctggaggtgcccttcggtatggtagcatccttattgcaagtgagaaactagtctcctctgaatctttgatttcaaaagaaataaatttggagcctttttagatgggtcggagaagaaaacgaaggtgagaaaagtcaaccaaagcatgaacattccctggcaaactcacagcagggtgtggtttggagccagccttgaaccctgcatgcttccaaaatggcacctcctctcaggttttgtcttcacaggctcctggtggagcccaacgtttcatgggaattggctacacttggagagccacaagcatgtgccatgtgcccagcattaactgtcattatctccttgaatctgaacaatgctccaagtagcattgttaatgccattgtgcagataaagactttgatcctccatatggacagtggaataatgaggcctatcttgttctctcttctgttaaggtctgtgttagcttgtcttagagatggtgcctacagtcctcctctccacataggcttttatcattcttcctgttgataggtggaatctgtttcctgctccctgaatctgggcgagcctgtgacttgctttgatcagtagaatgaagcagaagtgacactgtgtcaattccaggcctagtggttgagagatctgggagtttctgtgttggccctcctggaagtgggctgctgtgctataagaacatccatgctatcctggtagagtgatgccatgggaagaggccctgggggatgagtcaatatgtggaggaagagggcacccagcagcacatgcaggtgcagatacctgacagaagctgtctgggaggctctagtcccacccagatgaacacaggtgtggccacagctgacatggtgtagctttaatagcttgttttagtttaataataaattgtttcaagctgctacattttgaggtggttttttatgcagcaataaataactgtaagagtttgcctctccggagcttgcagtgagccaagatcccaccactgcactccagcctgggcgacagagcgagactccgtatcaaaaaaaaaaaaaaaaaaaaaaaaaaaaaaagagtttgcctctcttttcactgaaaattaacttcttgtggcaaatggtcagctctgatgtttttcaaaattaggaacaattgagctatattcttcctggagcaatggcagacaacgaattggaaccaggaaaagcccaactttaaaccctggcttcctgagaaaatcagcatcaacttcactccctgcagtccattctagccagattttgtttggtagtggcggtggtctgagctcatagccaggaaatttgaatgcaaaaatttccacttttggtgggttgtgacacagtctacattctactttgggaaatacttgtgttttccaaggatagcttagtttatcatgtgagattctgcttcagtggccatccttatgctgatactatgtgaagagacaggattgtctttcatcttagaaagatctagatgacgtttttgctttgctaaggggtgggattttaggccctggcaaaggcaggtaacctaacagatgcctcatggataaaaattctgcagaagcaaggtgcttgggaaggtgggcctggaatagtagtttttctctgaatgtggggtagttcatctctctatgtcaatttttattgggtagggcttgcctgcctttatgtttttaaaacaaatgttggttctatatttgaactccctgagccaactttgatgaggggcaggaagacagagccaagatggcaaaagcattctgcaggcatcgattccctacatggtggcttctcatgtgatcattttccagcccctggaagccttttgggaactcggaagcacttatcctcagacatgtggctcattcttgtttcctccaggagccaataggtggtagcaacgggccagcaaagaagcacctgctaaggtgggtggttcagcctagctgtcaaggcgatagaagcagctatgtggtttaagtcaaagaatacctctagagaagaactttaagtctgaatgtatgtgatgcagacactagcttctcaaaacagcctggcttagcacagactccatcttccaaggatttttcatctctctgaatatctctctagaatatctatctaccttcttggcagatgggagtagccaggcacattgggagtagccaggctgcatctgagcacctgccaaatggtgtgcagcctttgggggctgtgaacacatgccagttgtgctcctttccctggtagggcctgaccataccctgggcatgtggtccaagcccagaaaggtgcggggaggcacaaagatgcaaacagctggatgggcaaacacaggcacaaacatcccatgagcactgactgtggggatatgtggaggctgtgaggatgagaaagacatgatggaaggatgatgaggcagggattggcatgaggctgggctgctcaaggaaggtttggtgaagatgtggagtttgggaagaatttggaagaaggaacccaacttggtggggaaaaaatactgtggaggtggaggaagcatcggaggagctgctgtgatggactttgattggttcagccgatgagaagtctcgggccaaagcagctgttgactaggggggtacctgggagctgatggtgagaaacattagtgtgcggattcctgtgcaccaggttatggcccatcggcgggggcagccgcgtcagtgtggataatatgaatgtcatcagcaaaccagattcagaggcactcacaaagcttgacttgcctgacaccttttatcccacattcctgttgtcgaataaatatctttcaggccttcagaactttctagactcaagtctttattagaaaaggtggcatcataaagagtctatcacagtctctagggggcctcctgtagctccgctgacccctattactgcaggtgttccgtacatcttctatttggtgtgatttacacagactcacaaggtgaagaaccccactgggataaaaagaccagagatgtcccaacttgggggcaatgatttgctttttaagaacaatgtctttcaaatgttattgaccacaagttatacaaaaaaatacatttttaccatataacccggtatacacattttaatgtgcaattcgtaattgaaattaaaagttcattaaacaattttcactttgtattatatcttttttattttttaaaaagctgacagtgacacactaaatggatctgataaccccagcagttttctttttacagtttgtatctttctttccaaccaagatacctctgggttgacttctaaaaacagatgctctcacttcttcagagaccgccattaacctgcttcttgtgatcacttgactgggtactgggcagaagtttgtcttctcgataagaaagagcagtgctcagcagattgagagaacaaattgtagaacttaagacaaaaacagtgacagaaagcctagaagcaaggatttgatttattcacatagagttgatgtgattatgtgtttagcatgtaattgccttggttgctttctttgggagcgtttctcccccatcccccacctgtattttaaaaaccttagggtcaaggagcaggcagtatagcctaaaataggcttgtggtaccaatgtcatgaacccttcctaagggacgtgagtttgcagctcctagtgtctttctgggcattgtgcagcaaaatagttaaaaagccagaactccagctttccaacactgagcatggatcccagctcctccatgtcttttctgtgtgaacttgtataacttcaactgtctgtgcctcagtttctttacctgcatggggcaataatcacagtacctacaccacagggttactgaaaagaccagaggagagaatgctgtaacatgagctcagtgctggggacatgtgagtgtcacctgttggtatctgatagggctccctgaggcttcctgttagacaatatctttttaccagcctacttccagcaataggctggaagtgataataaaagcatattcctttctttaaaaaaccctataaacctaaacttttaataaattctgataggcctttccatcaatagactggcttttcgagtctcataagataagctaatttttggaaaagttttgcttgttaatatctcacagccaacccagagtcagtaaaatcaacagagaaatgaaatacaggcaggttaacaagtttcagcaatgtgtcacagtggaaccctttaaaaaatactgaccaggctacagtgtcagtaagattccaaattattgtctaatagtcatcactttcttgaactacataggaatggactagataaaaaaaatacacttagaaaatcaacatagttttactcataagagattgcatgaaagaacttaccttgagatgttcatggcaagcaacatgattccatatactgacaaattttatttttccatttgtggcattttctcccctaataactgctctgttgtgaccatgggaatgtcaggtatataaaaatacccaaataatgagccctctcctaaaatgataaagaaaaccaatttttttatttctccttgtcctctccagcccagcttcatactgaccttaaaactttgggcaataaacctgtcatatagtgttgcgtgcttggttccatcagcattttttggtgtgtgtgtgtgtgtgtgtgtgtgttagccaaaacaaacagcgtattgtctactacgaacatgcaaggacaagttttttggaggagcttgggtaagcgttgtgcagggacttaaatttcggcttcatgtgcatgacggttgaaggctcccttgtcagtcagcctggggcagcacaggaagggggaagaaggtgagagaaggaaagcagttgtctcctaggaatacaatgaaaggtggggctgaggggaaagaaaggagaaggaaagacatacaggaggcctctctgacctaacaggacaccagtaatccgtgttgctttccaagatccctgggattagcacaaacacaattgatgcgtattccgcaggtgcctagtatggaggcttcctcaggctacctgagaggaataattttcctcttgtgagatgctctgtctaaatccactttgattatttttctggggttcgctgtggttgcattaagatttctaaggtaggaggcattattgtttcttctctctgtcttgcacctgctaaaggtgatcagtcacttcctatctggaaaacctaaccttccaccccatcgtcaccctagcccaggcccatatccttccttagctagataatggcagtggtcttgtctcctatacctgtttcctgtgtcaccttttcaacttgttctccctcttggaatcataatcatccttctaaaatgaaacgctgaccatgttattgttgtaagctcatggacatccactgccttcacagtgatattctaactccttagcatggcgtgcgagacctttcaccatctgactagccctgctcacttatctcaggagcacttaccttgctacaacatagacacctattctctatgagtccatacttcaattcctttgtaggtgttatcttctcttctgagaaggtaacctgctccccatccctgactcattccatgttgttctgtgacaaactcctacttataaacattaatcacaaatattacttagttaaccctacaatgataattggagactccaaaacccaagctcaacaattgacataaaagccagaaagaagataagtaaagaagcagaggacttgaccaacacagtaaagcaactagatctaacagatatatacagaacactccactcagcaacaacagaacaacttcctctcaagtgaacatgggacattttccaggacagaccttatgtcaggccacaaatcaaatttcagtggatttcaagaaacagatatattcaaactatcatctgtgaccatgatggggtcaatttacacatcaataacagaagaaaaactgtaaatttcacaaatttgtggaaattaaataagccactcttacacaattaaaggatcaaagaataaatcacaaaagaaattagaaaatacttaaagatgaatgaaaataaaaacacaacataccaaaacctatcggattcagtaaaagtagtgatttaaagctgtgaacacattaggccagaggtggtggctcacacctataatcttagtactttcagaggccaaggcaggtggattacctgaagtgaggagtttgagaccagcctggacaacgtggtgaaaccctgtctctactaaaaaaaaaatacaaaaaattagctgggcatggtggctcatgcctgtagtcccagccacttgggagactgaggcaggagaattgcttgaacctgagaggcagaggttgcagtgagctgagatcatgctactgtactccagcctgggtgacagaacgagactccatctcaaaaataaataaataaataaataaataaagctttgaacgaattaaaaaagaagaaagatctcaagtgaacaaatgaactttacaactaaggaactaaaaaacccaaattaaacccaaagttagcagatgaaacaaatcgtaaagattaaagcagagatgataaaatagagaagagaaaaataatagagatcaacaaaaccaaaagttcactcttcaaaaaggttaacaaaattgataaacatttagctagattggctaagaaaaaagatagaagactcaaataactaaaatcaggaatggaagtggggacattactaactggttcgcagaaataaagtagattataagagagcactatgaacaactgtttgcccacaaattaaataacctagatgaagtgataaatcagagacacaaagcctatcaaatctgaatcatgaagaaatagaaaatctgaatagatctgtagttagtaaacagactgaattagtaatcaaaaacctcctgagaaagaaaagccctggacctgatgccttctctggtgaattctcttaagcatttaaagaactaccattaatccttctcaaactctgccaaaaaattgaagaggtgggaacacttcctacctaattctgtgaggctgggtgttgactgataccaggccagccaaaacattacaataaaagaaaactacagatcaatatatatgataaactttaatgtaaaaatcctcaacaaaatactggcaaactaaattcagcggcatactaaaaggtttatacaccatgacaaaatgtggtttattcctggaatgcagggacggttcaatatgcaaaaatgggtcaatgtggatctgtctttattttgctttgtttcgccaatgagcttaagacatttttaaaaagcaagaaaatatatgtgaatataaaggtattctcaagttagagtgacaaagaatgcaaatgatttcaacactttttatattgattgcatgttaaaatgataatatttggatatgattgggctaaatacaatatattattagaataaaaaagttggccgaggcgggcggatcacgaggtcaggagatcgagaccatcccggctaaaacggtgaaaccccgtctctactaaaaatacaaaaaattagccgggcctagtggcgggcgcctgtagtcccagctacttgggaggctgaggcaggagaatggcgtgaacccgggaggcggagcttgcagtgagccgagattgcgccactgcactccagcctgggcgacagagcgagactccgtctcaaaaaaaaaaaaaaaagttggtcagtgtaatataccacattaacagaatgaaaaaaaaaatccacaggatcatttcaatgatttagaaaaagtatttgacaaaagtcaacatcctttcatgattaaaaaaaaaaacacactcaaggtaactacctcaacaatataaaggtatatataaaaaatccacagctagaatcatactcaatagtaggaggctgataaattcctttaagatcctgaacaaggaaaggatgcccactttcaccccttctgttcagcgtagtattgccagctctatccagagcaattaggcaaggaaaacaaataaaggctccaaataggaaaggaagaaataaaaatatctctgtttgtagatgacatgatcttgtatgtagaaaacactgaaggttccacaaaaaagtcttaaaactaataaacaaattcaacaaagtcgcagaatacaaaatcaatatgcaagaattaattgcattttcatacactaacaatgaacaattcaaaaataaaattaaatgaaccaattccatttacaatagcatcaaatataataaaatacttaggaattagtttaaccaaagagtgaaagacttctacaccgaaaatgataaaaagttggctgggcacagtggctcacacctgtaatcccagcactttgggaggctgaggtgggtggatcacctgaggtcaggagttcgagaccagcctggcaaacatggtgaaaccccatctctactaaaaatacaaaaattagccaggtgtggtggcatgtgcctgtaatcacagctactcaggaggctgaggcaggagagttgcttgaacccaggaggtcaaggtttcagtgagccatgatggcaccactgcactccagcctgggtgacagaatgagatcaatctcaaaaaacaaacaaacaaatgaaagaaaatgataaaaagttgctgaaagaaattaaagaagacacaaataaaaagaaagatatttatgttcatgaactggaagacttaatattgttaaaatgacaacactacacaaaacaatctgcagccttaatgcaatccttatcaaaatcacaatggcatcttttgcagaaatagaaaaatttgtcctaaaattcttgtggaatctctaggggttccaaatagccaaaaacaattttgaaaaagacccaagttgaaagtctcacacttcttgatttcaaaatatattacaaagctacaggaatcaaaacagtgtggtgctggcataaacacagacatatagctcaatggaacagaaaagagagcccaggaatacataaccccacacataaggttaaatgatttttgacaagattgccaaaactttcaacgcagaagtattatcatttgttgaaggcacttaacaaacgatactagaaaaactggatatccatgtgcaaaagaacgaagttggacctttgactaatgttatatataaaaactagagatcatggcggatgggaagcaggactagattgcagctccaacttggacggacagagaagcagggggaagctaacatcgtgaatttttgctccagagtgattagaggaataaatcagaaaacctgagaggacccacagacccccctgaaggaagtggattgctcctgcaggacccaagagacaccccaaatactgtgctgttatccatggctgagagacccaaagatggttcacatcacaggactctgcagacaacccctagtaccagcctggagcctgggtagactttctggttggctagatccagaagagagatgacaatcactacagctgggctctcaggaagccacaaagagtactacaacaagggaacctctgtgggaaaaaagaaactgaacagcagccttcagccctagactttccctctgacagagcctacccaaacaagaaggaaccaggaaaccagctctggtaatatgacaaaacaaggttctttaacacctccaaaaaatcacactagctcaccagcaatggacccaaaccaagaagaaatccctgatttacctgaaaaataattcaggaggttggttattaagctaatcagggaggcaccagagaatggtgaagcccaatgtaaggacatccaaaaaatgatacaagaagtgaagggagaaatattcaagaaaataggtggcataaataaaaaacaatcaaaacttcaggaaacaataaacacacttatagaaatgcaaaatgctctggaaagtctcagcaatagaattgaacaaatagaagaaagaaattcagagctcaaagacaaggtcattgaattatcccaatccaacaaagacagagaaaaagaataagaaaatacaaacaaagactccaagaagtccgggattatattaaacaattaaacctaagaataattggttttcctgaggaagaagaggaatctaaaagtttggaaaacattttgggggaataattgaagaaaacttccccagccttgctagagacctggacattcaaatacaagaagcacaaagaacacctgggaaattcatcgcaaaaagatcatcacctaggcacattgtcatcaggttatctaaagttaagacaaaggaaagaatcttaagagctgtgagacaaaagcaccaggtaaactataaaggaaaacctatcagattaacagcagatgtcttagcagataccctacaagctagaagggattggggtcttatcttcagtcacctcaaacaaaacaattaacagccaagaattttgcatcaagtgaaactaagcttcatatatgaaggatagatacagtctttttcagacaaatgctgagagaatttgccactaccaagccaccactacaagaaatgctaaaaggagctctaaatcttgaaacaaatcctggaaacacatcaaaacagaaactctttgaagcataaatctcacaggacctataaaacaaaaatacaattttaaaaataaaaacaaaaaacaaaaaaaccaatgtatacaggcaacaaatagcacaatgaatggaatggtaccttacatgtcaatactaacatcgaatgtaaatggcctaaatgctccccttaaaagatacagaattgtggaatggataagaattcaccaaccatctgctgccttcaagagactcacccaacacataaggacttgcacaaacttaaggtaaaggggtggaaaaagacatttcaggcaaatggacaccaaaactgagcaggagtagctattcttatatcagtcaaatcagactttaaagcaagagcagctaaaaaagacaaagagggacattacatattgataaaaggccttgtccaacaggaaaacatcacaatcctaagcataaatgcacctaacactggagttcccaaatttatataacaattactaatagacctgagaaatgagatagacagcaacacaataatagtgggggacttcaatattccactgacagcactagacagatcatcaggacagaaagtcaatagagaaataatggatttaaactatactctggaacaaatggacttaatagatatatacagaacactccatccaccaaccactgattatacattccattcaacattgcatggaactttctccaagacagaccatatgataggccacaaaatgagcctcaataaacttaagaaaattgaaattatatcaagcactctttcagaccacagtggaataaaactggaaatcaactccaaaaggaacctttaaaaccatgcaattaatatatggaatattaaatattttatacaatatttaatacatggaaattaaataacctgatcctgaatgatcattcagtcaaaaatgaaataaaaatggaattaaacaactcttcaaacttaatgacaatagtgacacaacctatcaaaaacctctgggacacagcaaaggcagtgctaagaggaaagttcatagccctaaatggctgcatcaaaaattctgaaagaacacaaacagacaatctaaggtcacacctcaaggaactagagaaacaagaaaaaggcaaacccaaacccagcagaagaaaggaaataaccaagatcagaacagagctaaatgaaattgaaacaaaaaaaaaatacaaaagataaatgaaacaaaaagttggttctttgaaaagatgaataaaattgatagaccattagcaagattaaccaagaaaataagagataaaatccaaataagctcaataagaaatgaaacaggagatattacaagtgacaccacagaaatgcaaaagatcattcaaggctactgtgaacacctttatacacacaaactagaaaatctagaagagatggataaattcctggaaagatacaaccctcttagcttaaatcaggaataattagatatcctgaacaaccagtaacaagcagagagattgaaatggtaattaaaaaattaccaccaacaaaaaaagttcaggaccagacaaattcacagcagaattctaccagacattcaaagaattggtatcaatcttattgacactattccacaagatagagaaagagggaaccctccctaaatcattctatgaagccagtatcaccctaatactgtcagaggcatctgaaccaaagcgactccatcttgagtgagggctaggaaaatgaggctgggccttgctgggctgcattctcagaaagtcaggcattcctagcctctagatgtttatggttaagggaacaaattaataatgtttactaaatagacccagacttgggggtgtccagctatcctaatatctggagaatgaaggcattcctaattttgctttgaagataatattgattcttgcaaaatatagtaattaagaaaattaatcctttatcacaaacccttgtagcagaacacatctccccatatatacgagcattgtacctaagatgcatgcgttcctcctcttaatttcaggaatgtcctacactgtctatggagtagctgtactttcaccactttattttcttaataaacttgtttttactttgcattgcagacttgccctgaattctttcatgtgcaatatccgaaaaccctctcttggggcctggatcaggacccctttcctataacatctttctggcgacaacaaagggacaatggtgtggaatcccccttcccaaatgctacttttaggtaagtattggggtcctgtaacatatttctggcaaaccatggaatggacaatactgaagaaactcgccaacccaaaggatatagactgtagcaatgattggacgactctgagcaagtggtggggtacctgggtaaagaatcggatgggattagaggcccaactgggggagttagagtctctcccaagccagagtgggttagaggcccctcttagtgaaaggcaaggacgcttgacccaccttgggttataggcccgccttaggagggttaaagtcccttccaagatttagggggctggaggcccctctcagtaaagtccctctcagctaagaatgagtttggcactgcaggctatgctctttgtattaatcttccttgttcttcctgctgcatcaatcaatttctcggttgctgtctgtttcgctgtcattttcagaagactttatttaacgggtcttagggattttaacttactcttttcctatgtgcctcctgatttttgtctgtttacttgtgaaacattgagagcaaaaaccattgaaggctctgtctctaaaattgttcattgagatttggtatttaacagttataagcaataaaattaaacagatgtggttatgtttggttgctgctatgctgactaggtgtgatcgagaagcactaggatggaaatcaggggacttttctccttgctgttttgttttattttacacactaaaaaaacttctttcctttcttggattcaggcaaactggctttgcttgttcaatccacactgccgctatttcccagaacctgcttgctctggtcattcccatctaaatcctcttcatttcctttgccttatttgacatttttgtcaaagtccatgttgtggtttatctgagattcatggcttggctcacttatgttatttggataatgtgaatcatgtttgatgagaggaaaggaaggaaaataagaaaaagagctagatacaccagatgattctttaatacacccctcccctccccgccattcagtgggcagttttgggtggagcagaccctccttctctcagttctgatggttcagagctggttctttctccctccagtccacttgaaagttcagttgagaaccttttgtcccctcttccttacctgtctagtctactctatacccacgactccctgaggaacttagcccagtgagtactactcatagtgaagcctcctatcagcttccaaagggaaatctttgtctatttagggaggtggcagatggggaagaaggcactgtgagagtacatcttcccttttctatgtctgatttggctctatgtaaagagaagtttggtcatttctctgaagatccaggaaaattcatagacgagtttgagaaattaactctgacctatggtttaacttggcaagatccgcatgttttgtgttctctgtgttgtacagtggaagagaaacaacgcattttggggacagctaggactcatgcagatgaagtattggctcataatctgaaccataatatgtatcaggcaggaggtatagcagttccagatcaagatccagagtggaactatcaaaggggcagtgaggacttggggaggagaattgtaaggtcacttgtttgtaagaagggatgaagaaatgtatgaaaaatcccattaactatgaaaatgttaaggatgtttctcagggcaaagatgagaatacagctttatttcaagggcatttagttgaggcaatgaggaaatatactaacactgatcttgcttcaaaggaaggacaaaccctctgggagtgcattttataacccagtctgcccctgatatccataggaaactacaaaaaccagctatgggtccccaaactcctatggacagcttttggagatgacatttttagtttttaacaacagggacaaagcagaggaagcagaaagagcaagaaggacctcccacaaggtgcagctcttggctgcagcctccaacttacctcccacgtggggctgccctcctggctgttggcctggacaagggaagctgaaaggtgggaagcccaaagctgggagtctgagtcaccatgccttgggaataatcagtgtgcacactgtaagaaaactggccgtaggaagaaggattccccagggttcggaagggagtcactgggacctgaaccaatgatggccgaaatagctgggcaagcccaagagtgatagggcccgagaccttccactgaagctcccattggacaactagccatatctccagagaagccttgggtaacccttaatgtggcaggtaagaatattaactcccttatggactgcttactctgttttgacccattataatgggactttgtcaccccaaaatggtatagtcatggggatagatggacaatcccatagacaccattttaagaatcctttaagctgctcatcagggactttggtttttctcctgaatgccccataccttgttgggaagggatttgttaattcagctgcaaacagtagtatctttcataaatcacaaggcagacagaaattgctccttctcctttcctatgaataaatgtcaggctttgttgctaaacatccttatataattcttaaagtatgccagactgaacccagctacctatttacctgaactggcaccctagatcattcttgtatacaaattatggagctagtttactccagccatctggatttaaaggatgagcctctagataatcctgaggtagaatggtttacagatggaagtagcttcgtgcaccaggaaaactggcaagctggggctgttgtcagtcaacatgaggtaattggatctcaagccttacaagcctctaccttagctcaaaaggcagaattaatagctcttattagagccctgcaactgggaaaggacctaagaattaacatttacactgattctaagtatgcctttctggtacttctgctcatgctgctatctggaaggaatggggactcctaactgttaagggttcccctgcaaaacattacttagaaattcggagaatattgggtgctgttttgctgcccaaggaagtagctataaaccattgtagaggttatcaaagaggagactctggtgcggctaagggaaactcctttgcagatgcaactgctaacgcagcagcactaaaggagccaataggacttattggcatgttggtgccctcagccactgcattgacagaccctagatatactaaagaggaacaagaatgggctaaaggtcagggtttaattaaagatcctctggctggcttatcaatgacaacaaactgttattaccaggtgctaatcagtggaaaataagcatttgtgtgactctagtcatttgggaagatatttcctgtttcaattaactttttataggaaaagacttaaaacagtaaagcagctaactcaggcctgtgaactatgcgcctggaataacccaaataaccaatcttcacctcctcctctagtaaggcctgttcagcacaggggaacgtaccctgttgaagactggcaaataaattatactcaaatgcccctatgtaaagggtttaggtatttattagtatttgttgacaccttttctggttggatcgaagcttttcctacctggtctgaaaaggcaattgaggtttctaaactcctactaaaggaaataattcctagatttggtctgccttaagagcttgcagagtgataacggcccatctttcacagcgacaattacccaaaacatatctttagccctaggaattcagtaccaccttcactaagcatggagaccacagtcttcagggaaagtagaaagagctaatcaaactctaaaaatgactcttgcaaaactatgccaagaaacatcagaaacctagttgtctttattacctgtagtcttattactggtttaaatagcctctaaaggaaatctgcagctcagtccttttgaaataatgtacggcagacctttcttaactacagactgtctaatagacatagatactttcaagttacagaattatgtgatcagcgtaggacaagtgcaaaacgcactccttgaatatggaaatcaaagactcccttcccccactaaggaagagaatcttgttacaacccagccgggagactgggtcctattaaaaacttggaagaaatgatccccagcagatcaactgtccccccaaatggaagggatcctatcaagttctccttagtaccccaactgaagttaaacttctgtgaataaacagctgggtccacttatcttaaattaaatctgtctcttatgaagtcccacaggccagtggaacacaagagactaatcctgtttattcctgtgagccaataagtgacctctgactcctgttcagaagaaatgagagggatgagtaacataaagatacgaattggcattctacttttgggtataagttggaatcatgcagagagtaacttatttactgagtgggcatagactttagcctctttacataatcagacaaactgctggatatgtggacattttaacgtaccagcggcccaagggggaacttgtgtatgatcaaaactgaatgttttgtgtatgttccagactattcacattgacattactcaggctatgaaagctttagacactcagatctctgccaccgacgtgctatcagtcaaccctatattggcttggttccaacaactgtccagttcttggaaagctttcctgtttagtttacttggaacgactttacttattttgctttgctgttgtggaatatattgtggctgtactctttgtgtagaaatgcaagacaaactcactcaatgcttttttaaattgaatacttattaatcttccagatatcaccttttgtcggaacttggagttggtaatgaccttcaccataccaccactctgggactgagcttctctctaccctgatgcaagagaccctaataggcaggaatatgaccacccctattcagcctgaagaagttacagaagttctgaaacccttagaaatgagggtcttcttgtaaagggagtggggagatatatcagaggcatttgaaccagagcaactccatcttgagtgagggctaggaaaatgaggctaggacttgctgggctgcattctcagaaagtcagtcattcctagcctctagatgtttacggttaagggaacaaatttataacatttactaaacacacccagacttgggagtgtccagatatcccaatatctggagaacaaaggcattcctaattttgctttaaagacaataatattgattcttgcaaaatatagtaattaagaaaattaatcctttatcacaaacccttgtagtaaaacacatctccccatatatacaagcattgtacctaaggtggatgcgttccatctcttactttcaggaatgtcctacactatctaaggagtagctgtactttcaccactttactttcttaataaacttgtttttactttgcaccaaggacttgcactgaattctttcttgcgtgagatccaaaaaccctctgttcgggtctggattgggacccctttcctataacatccttctggcaaccacagaagggactatagtgtggaaactcccttcctaaatgctgcttttgggtaagtgttggagtcctgtaacatatttctggctgtcacagaacagattatagtgcagaaaccctgacccaaaggctacctttgagtaagtgctggggtcctgtaataatatcaaaaccaggaaaggacataaccaaaaaagaaaactacattccaatattcctgatgaacatagatgcaaaaatccttaacaaaatgctagctaaccgaatccaacaacatatcaaaaagataatccatcatgatcaagtgggtttcataccagggatgcagggatggtttaacatacataaatcaataaatgtgatacaccacataaacagaattaaaaacaaaaatcacacgatcatctcaatagatgcagaaaaggcattcaacaaaacccagtaacatttatgattaaaactctcagcaaaatcagcatacaagggacatatatcagtataataaaagccatctatgacaaacccacacccaacataatactgaatagggaaaagttgaaagcattccctctgagaactggaacaaaataagaatgcccactctcacccctcttcttcaacatattactggaagtcctagccagagcaatcaggcaagaggaagaaataaggggcatccaaatcagtaaaaaggaagtcaaactgtcactgtttgccgatgatatgattgcttacctagaaaaccctaaagactcctctagaaagctcctagaactgatgaaagaattcagcaaatttctggatacaaaattaatgcacacaaaccagtagctcttctatataccaatagcgaccaagctgaaaatcaaatcaagaactcaaccccttttacaatagctgcaaaacaaaagtaggaatatacctaaccaaggaggtgaagacctctacaaggaaaactacaaaacactgctgaaagaacttatagatgacacaaacaaatggaaacacatcccacgctcatggatggggagaatcaattttgtgaaaatgaccatattgccaaagcagtctacaaattcaacacaattcccatcaaaataccaccatcattcttcacagaattagaaaaaacaattctaaaattcatgtggaaccaaaaaagagcccatatagcaaaagcaagactaagaaaaaaaatctggaggcatcacactacctgatttcaaactatactacataagaccatagtcaccaaaacagcatggtgcctatacaaataggcacatagaccaatggaacagaacagagaatccagaaataaacccaaatgcttacagccaactgatcttcgacaaagcaaacaaaaacataaagcggggaaaggacactgttttcaacaaacagtgctggggtaattggctagccacatgtaggagaataaaactggatcctcatttctcatcttatacaaaaatcaactcaagatggattaaggacttcaatctaagacctgaaactataaaaattctagaagataacattggaaaaactcttctaaacattggtttaggtaaggatttcattcatgactaagaacccaaaagcaaatgcaataaaaacaaagaaaaattgcagggactaaaactaaagagcttttgcatggcaaaaggaatagtcagttgagtaattacagataacctacagagtgggaaagaatcttcacaatctatccatctgacaatggactaatatctagaatctacaatgaactcaaacaaatcaacaaggaaaaaaacaaaaaatcccatcaaaacgtgggctaagggcaagaatagacagttctcaaaagaatacataccaatagccaacaaacatataagaaaacactcaacatcattaatgatcaggggaatgcaaatcaaaaccacaatgagataccacttcacactcattaggatggctattatcaaaaaacaaaacaaaacaaaacaaaacaaaacaagtgttggcctggatgtggataaattggagcactgtgcattgctgatggaaatgtaaaatggggcagccactgtggaaaacagcatgcagttactaaaaaaaaaaattaaacatagaattactacttaatccagcaagtctacttctggatatatctacatatcaattgaaagcagggagtaagacagatatttgtacacccgtgttcacagtagcattatttacaatagccaaaaggtggaaacaacccaagtgttcatcaatggataaacggataaacaaatatggtatacacataattaatggcactgaaataccttcagccataaaagaaaggaaattctgacatgctctatataatatggagaagccttgaaaatgttatgcaaagtaaaataagctagacacagaaggaaaaatattgcatgactccacttatatgaagtatatagaataggcacctcatagagacgaacataggttagaggtcacaggggctgggggctggggagttattttttactgggtacagagtttctgtttgggtgatttaaaaagttttggaaatagtggtaacggttgtacaacattgtaatgtaattaatagcacggaattatacacttaaatatggtaaaatggcaataatcattgatcatacttatatcatattgatcatatatatttcacaacaattaaaaaatagtaaaaggaaaccctacccacaaaaaacataaatgattaaagcattttaaaatatgatagtgagtatttatctgatctttaaatgggaaaggtaattcaaaggataaatccaataagaaactcataaatgaaaatattaatagaaattttccaaacaggaattaaaatccctttaatttccaaaagggtgtataaacaaaataaagatgcatccagaaatacatttaataattataacatttgacaaaaggttaacccttaaaatatagtatcatataatttaataaaaatcacaccacgccccacaaaaattcatgggcaaaagcaaaatatgataattcaccaaaaagaaatacttttatttaataaatattttatgcttttcagcctcattggtaaaaaaaataataatttttaaaatgaaatatttcttcccaattatcatgagaatatacaggactggtgaaagattataaatttctccaacaatttttgaatgactttttaatagtatgtaccaaagaatgtttgtatttttaaaaataataatttcacttctaggaacttagcctaagaaatgtttccctgactgcagtatataattaagaattatattcattttgcattatttaaaattgtgaacaattggtaacagaatgaacaataggggaatattttggaaaaccacatttcatcatgttaaggagaaaagccagaagataaagttggatataatgtaggatcacaattaactaagtgtgcatgaaaatacgccaacaattttacagctattggtgatactttggccccttttttcttttttgtacttctcaatttttctataattaactgtcacttttgtaatgaagaagagaacttaaccaatggtattgtataagataatgacttagaaaatctggaagagtactatttattttgattctttggaggcaaataaagtaaaaaaaatcttctttctaattaagtcaaaatgatttgggaacaaaatgaaatcctgatagaataagagggcatgaaaatgtctatttcaagagacctggcttctggcttttctagaatcatgtgtaggcaacaattattactgttattcctgcagactcagtagtttagtctcaaaatatgtgatctgatcttatttgtttgggttccatatttatgcaacaaatattaactgagcccctactctgtatcttagactgttacagagggaaaaaaaagaaagtttgttaataacagctgctgcttattgagtacctacatgaatgttggaggtgttataactctacaaggtggaactatgattccctctttaccaaggaggtaactaaagaccagagaggaacttgctccagttcctttattgttcccatagcaataaagtaatggatgtggtttttaacccatcccacaatctttcagttgctccatgccatcatgcttccaaaatagcgagtgatggcattccattacagaacataaatacatcttgccatgagcagtcttacggccccaggcttggctgtgctctctcccctggcatactctcctgggctacgtgcccctcccacctctgaagtgcaaatgtgccagctggacaaaacacctagatccccaagaagggtgcggagcaggcagctctcccaatgcatgctggtctgacaggtttgctttagtgcccagatcctatcgaggtcttgaacctgtcctgagggagagttgttgacagaaaggtgtagagggataacatatttgtcagcaaaatcgctaaggggtaagcagagctctgctggcagccgagtttctgtgggataaagagacacatgcccttagttggttatgcacacaaagcaaccaataggtccaggctttctggctctccgtcagcttaatcagacagaaaatcactgaggtattaaaacattttggagaaactcaaacaactcagccctcagatgcctcatcttgtaaagtttgcacgctgagccagaactaaataatttccaaggtttcctacagttcaaggagcttgtgatttggtttgcacaagacttggaaaaacatttatcatttgatattaaattaaaatctaagataatactatattcctagaatggtcccaaatagatttaaaataattacattttcataggaaaaaggctcggagagatttctaaaaatatttataacgtgtgatcatagatgatgtaaattttttgcttatttctcttatgggtcttgttaaatattaaatgtctatattatttaattattaaatgtgtatattgtttaattattaaatgtttatattgtttaagcagttacttgcagctgaatgtaacctaactaatagaagagattattttagagtgtttggggaagggtctctgagcaggtgacatttaactgatgtgaagaagtgagccatgtgaaagaatagggaaggacattcttggcgaatggaacaagaacaaattggtttgttccaggacagcaagaaggaagactaatgtgtctggggcacagggaggtgggggatgaggtcaccaaagggggcaaggcagatagcgagagtgagtatgggttaagaaccagggctggagagggaggcatggactagaccacaaaagccttggagttgtaccatgttctgtgattccaggtacaatggtaagtaagccatggttgggcttcgagtatagtgacatgttctgatttttggtttagaaagcaaactgctgaaggcagagagatcagttaggagctatggctgtagtccctgtgtaagatgatggtggcttggacagggtgtcagccatgggggtgacaagaagcagtcaggctttgttgatggattggatatggggtgtgagaagtacagaggagtgaaaaatgactcccaggctttttgtctgagccactgggtggatggttgtgccatattccaagaaggtaagactgcaggaagaaggagcttgggatgggttaaaaagaaagttttgcttggacatattgagttttaaatgcttatttggcaaccacattgagatgctaaggagataattgatggctgcatctggaacttagggaagacgtatgaggcagaaatatacatatgggtgtcatcagcatagaaatggtgtttggaatcaagggacagagatcgccaagagaagggggtagagagggaagagaagagcccaaggctgagcctcaggtaccttaacacttagaagtgcagaaggaggagcctggagaaggggctgtgaagaagtggtcagtagggtagggagaacgaggagggtgtggggtcttagaaacatgtgaagaaagtgttttcaggaggtggaagtaaccaactattccaaatgttgctcaaagtttcagtaagacaaagatatggcattgtccattggatttggcaaaatggagatccattatgacctcaaagagtgtgctcagtggcattgattaaagagaagaagagaagtgaatcaatggagatgtcaaaacatgtgcctttgttatgagtgcacatgggggaatggtacagtacgtagagaacgtagagtcctgggaggagcttttgaagacagagaaactggaacatgcttgcatgctgctgaggatagtccaagaagaaatccatgatgtaggagagagaattacagggaagaatccctgggaagaggtagaggagatggtgtctgggcaagagtggtgagctaaatttggatagaagatgggtcaatttatgtatggagctggagggaaggaggctgcatggagacagatgcagctgggctgggaagttagtggtgggaatatgaggctgttgtcctccctccttttttcgagacagggtctcactctgtctcctaggttggagtgcagtggtatggtcataactcactgtagccttgaactcctgggctcaagcaatcctctgacctcagcctcctgaataggtgggactacaggtgtacaccaccatgcccaactaatttatttttattttttagtagagataaggtctctctatgttgtccaggctggtcttgaactcctgggctctcaccttggcctctcaaagtgctgggattacaaacgtgagccaccttgcacagccagttctccattcttctgattgattttgctctctctgtgaaataagaaacaaagccgttgtattggagtgggaaagtgaatgaactaggttgggcagttttcaaactttttggtctcaggaccccattactctcttaaaaattgaagacctcaaggagtttttatttgtaggggttatctctatccaaatatactgtttttttaaatgaaaaaaattaaatttaattatacatttttaaagtaagagtactaaacccattatatattagcatgactcattgtattaaaaaataactattatccaaaacaaaaaaaaatagtgagtgtggtaagaaccagggctgggaagtgagtgaagtggcaattttacctttctttcccaaattattttaatgtctggcttaatagaagatagctggattctcataactgcttctgcatttgatctgctaagatgacgtacttcctgtagcctctgggaaactccactgtacagttgtgagaaaagaagaatggaaaaaataacttcttgatattactatgaatatttttagaccacacaggcccctgaaagggtctcaggcaccccattcacacttggagaaatgctgggcaaaggaaggatggtaagattgcttggcagagcctgggctcaaattcaggtttgtctgattccaagttcatggaagattatcagagcagtgagcctgggttgaccagcagcctcaaataaggaaacacggttctcaactcagccggtaagttaatgctgaaatgctgtggttcaaacacctcttgtggtacaaaaaccaagaggtatcagtttaaccaggaatatttcaaaggctaaaattttcctgaagtttctataatctcaggaaagaagaaccctgaagggtgggcatagcactggctcagctagcactgtctggggcttagagctgtactttgtgtttccagctgcagtttctgatttcttttggttctattctatttaaccattctcggaaggtccactggatagcaagccctgtgggagaagcttgtatgtggctgctcactccctacacgctgtaggcaatggggaaacattttttgagcagattgaccctaaggagacaaacacacatgggtagccccattccatctcttcaaagggctcccttgcactcagcagacccctgctgcaaccaggggtgtagaggagtgtctgaggacgtgagagcaatgcttctgctgaccttctcttggaagctcctacctacccaatacgatgtcccggggtatctaagccaccttgagtttcctttaagtgttatcaacagtctccttcatgttcacgtctggggtcaggattgcagctgcaggcgcagctgaacttgggagctcactttgcattacagcaggaaagatgttgataaaccctcgatcttcatttcccacacacacttcactacctttggtgtattgcttctatcaattctactggaaggtagggagcagaatatccaccccaaagggagaaaatactacaaatgcggatttgggatgatgaaaaaaagctccagcgagcgtagaattagggtctagctccaccctttgtgcaacagtgtcatgtgacctccacaaatactgggactcattttaaaatgatgtgctcacccccgaccctttctgctgtgtatttactgacttcctttgtcgtcagtgattcagatctgggtgtttacttcatgagctcagccagtaaccttgaagaacttgagtttcctctactatccttttaaccaaaattcctttttccttctccaggctgtttcccatataaggttcatgacccccagtgaggatgaaactgcctgcaaggtttgtcttctctcctgttcactggttactcagccaggctgattcatgggcttctcaaaggagcttgtttatcagaagcttgtctaagacaccacgtcttccagaaaatctcacctgagtcaccaacagattcctctaagagtctgtaagccactcctgaccagcaggaaaccccaacagaggcaaagaataggaaattaaatatttcgtcaagaaaaaatgagaggctgggtgcggtggctcatgcctatatcccagcactttaggaggcctaagcgggcggatcatttgaggtcaggagtttgagaccagcccggccaacatggtgaaaccctgtctctactaaaaatacaaaaacaattagctgggcatggtggtgggtgcttgtaatcccagctactgggggaggctgaggcgggagaatcgctgaaacccaggagacagaagttgctgtgagccgagaccacaccactgcactccagcctgggtgagagtgagactgtctcaaaaaaaaaaaaaaaaaaaaaaaaaaagcaagaaagctcccatttagatcactcggacaaaagatttctttttgtgccaaaatgttccactaggcttccagtttttaccacataacttgacagtcatgcaagacttaagtgtattttcagctatcctttctctttcatttatttctgtttaataagctctgtccattgattctagttagtacattatatatctttttaatcacttacctgcagtgagcatctttccatgttggtaaataccggtgctactactgttactactgagtacttattccatgtcaaatcctctgccaagcattttcaagcattgtctcattgccttcttgccacaaccctatgaagaggccgtgactgtcctcatccaatggaggaggaagctaaggctgagagcaattaacacagctgtgagtgaacaggtaggatttaaagccaggcagtatgattccggagcctacgcttttaatcactgttattttactctcctccactccccaaatatactgcattttttttgtgtgattgtattgtattattctgttctagatgtactatgattgatttcgtccatgctgtaattacacttcggttggttttagttttcactactacaaatggtgttgcaacgaacgtctttgtgggcaaatctttacaggtcatgaatgaccctttccttaggacacatattgccaagctgatctccacaaaggtagtacacgcccatcatattgtacaaaagtattctttgccctccacccttgacactgggttgcatctattttttaattattgctgttaggatagaagaacaaggctgacacattgttgtttcagtttgtaagctagaacacttcattgcacattagctgtattccttaggtgtatttcttgttcatgtcctttgccctctgaggtttgtctctttatcacagatttgagaactttttgtatatgtcttatatttttagaattaataaatttagggcataaacccaatagaaagaaaaacagactcattctgtgttttgcatagcatcttacctcctatccttcctccacattgatagtaaagcataagaaatgattcctgtgcccagaggttgaaagcaggtccattttaacaaagtcacttggaagcatcccctttctccaaaagaagctcccagcttctcctcctgctcttcggtctcagaggaagggaagatgttggagaggagcataaaaacttactttgggccaggcgcggtggctcacgcctgtaatcccagcactttgggaggccgagaagggcagatcatgaggtcaggagatcgagactatcctggctaacacagtgaaaccttgtctctactaaaaatacaaaaaattagccaggtgtggtggcgggtgcctgtagtcccagctacttgggaggctgaggcaggagaatggcatgaactcgggaggcggaacttacagtgagccgagatggcaccactgcactccagcctgggtgacagagtgagactttgtctcaaaaacaaaaacaaaaacaaaaacaacaaaataaaacaaaacaaaaacttactctgtaggggccacataatcagacaactggcttgagcaggccctatgccatcttttattgataatgatgaatcggagcggccaggcctggtatgtgagttttggacgtgatcctaagtggagttgtcttgtttatacttgttttccctttgttattattttggcattatcatggataattccatacttctagggtgtaattccagtgtaattaaacttgaacagcccaatatcacacaattgattacatacagcatttatttctaagtatttcagggctacgagtgtgaccaatgcctgggggtgttgagagctaattcaggtgccaccctgctggtctgatggctcaagagggctggtcacacacaaaccatggggttcatgggatgtagatcttcagagctggtgggttgggtgggaccaatggtttggtgcctgaatctcaggcctctcttagaaggctggcctctccacccatgccccagagatcccataggtccctattgttctgtccacagtctcacagacccttgatcccacccaccacaagaagggttctcaggaatcaggctctgacatggagtgtagtgtgcaggccgtatatgaagcagcacccttgtagaaggggagggaaggaggcaggagagggcagagggagaagtggagctgtgattcccatccaaggacacccttggccagctccatagggagatctgcagcaggacggccttttcgagttggcctgagttggtcaagatagccagctctccactcccataacaatcagctgtgggacctgggaccacctgggaaggggtttcattgtgggtggggcactctctgacccagaccctgaggctctgatggttggaggcccctggaggcagtgctttccccagcagggctgcaagcttggaaggagatggggtcagcatgccttgctgtccaccacacccctcctttctctgcttctcctgtgctactaggtcttcttcctccaggctgtctgcatctcagagtcttttcttgacacttgctctcattccttccttctgcttctaggtatgcctctgttttgatatcatcacagccccttccaatgtgatgtgtccttccaccttactgaaaatattcccctaagtcgccaaaagtccaggtactcagcttgtctcccctgacccacctctgacttcagctgcagctgggagaccatccctggcatcttaaggcatctggattggtgatgggcaaaatgccttctgccaagtccctggctgaatgtgtaggtgctgccagccttacagggggttgaggatggctttgtcctgccctgatattccacaggtgaacacttgatcctaacctctcctggcctcactcaggtgttcactagggacagagagcaatgccaggacacagttttgtcctactgatgtaaccaggtcactgccccaagcagagggtggccatggtcatgaggaaagagcaaagggaagcctgggggggccggggagttggggtcagggagcgggtggcctagaactcatccaaggttttggactgcaagaccatgtgcgagacgcggctccaactacctggcctgtgccccactgtcccgtgggattcagctgcaaaacacaaatccaaaaataatacaagaatttcaagatggcaaatgcagaacgataagccccaagcacgagttcctcttgcagcttccagctctgccaactcgtttcagtcccagtctcaggtttctgggtgccaggagggcagttctgcctgcatctccgtcatctctcagattcgacaggcccaaagtcaaatttcatatgcatctccgaactagtgttaccccccaaaacctggggtttgtttgcctggtgagtaacaaacaaatctccatgagaattcaggttttgatcaggacttttattcctaacgtaaggagagcacaggaatactttccaaaggcgtgcttccccaagggaaagcgacaggagggctttatggggcgatggtgaggggagaggatgcgtcatggcatgtggaggaggggtcccagtggcacagaggcagcgagtcatcaatcacgccagcatgtaggtcgcatgttatggtaatgaagctgtggctcctcccagggtggagacgctagcatggtcatgtggaaagttcacttgggcctgtctgtaagttgctgaggtctgtcaggagctggttccaatgactaggtgacctcattccactcaaggtttgggagaaaaccagctgcaggccgggcgcggtggctcacgcctataatcccagcactttgcgaggccgaggagggcggatcacgaggtcaggagatcaagaccatcttgactaacacggtgaaaacctgtttctactaaaaatacaaaaaattagccgggcgcggtggtgggcgcctgtaatcccagctactcaggaggctgaggcaggagaatggcgtgaacccaggaggcggagcttgcagtgaggcgagagagcgccactgcagtccggcctgggagaaagagcgagactccgtctcaaaaaaaaaaaaaaaaaaaaaaaaaaaagaaaaaaaagaaaagaaaaccagctgcaaggcaggaggctgtaaaacaggccgattgcttaagtcaattaaatttctatggtccctggagaccctccccatctgcttacattagcaccctactgtcaaaggtacccccattcacccaggacaggttttaaactggggaatcatctgtgttttatttttcagaagagagttattgataagcacaaggtcagtctatcgggtttccaacctccttcctacactcacacacacacacactacagccccccccacatatacatacacaaattcacaccaacacacacatttacacactcccacatgcatacacactcccacacatacatgcactcacacacatttacacacactcacacacatgcacacacatctacccacacacatgcacatatacagcccccccacacttgcacattcacacattctctcacacacacactcacactcacacctccctttgattctgtgggtcctggcataagccagaacttgactcctatctttgtgaatgtggcctgaagcaggatggactcagaacacactttttttttttaaagacagagtctctctctttctctgttgtacaatggcacaatcatggctcactgcggcctttactttttgggctcaagtgatcctcccacctcagcctcctgagttgctgtgactacaggcatgtgctgccatacttgcctattattttttttttttttgtagggctgagatctcactatgtttcccagcctggtctcaaattcctgggctcaaatgatcctccagcctcagcctcccacagtgctggggattacgggcatgagccaccgtgcgcatcatgaggacaattttgatgatgagtggcttttgctcatggtcacaaggataaattccacgtgcctgggagttattttttatttaaccttttttaggcttttaaaatatattatcacttgaacagcattaggaattattgtaaagttatatttgtattgatgtaaattacattgtaaagactttttgaagtgtgagtttttgttggtgtgcacccttttctttctttactttcttctctttttttcttataataattttgtatcagatttgacttcaatcatttttttggttcttatttttccatgaaattagacttttggagcttttaaaagggaagtgtactttgagaagttttctaatgtcatggctcccgagggctcttcccttgtcggtgtgagtgtgaacaagcctggcagctggcattgagatcttctgggtctgtgcctcttccacatttctctggacttttcctttctgttgtctcttctgcacctgcactgttcaggttggattctgatctctgcagtttattctgagagagcttgaggggtcagttttgagagcatattgtttgctccggccactcagaccttaactaagcactgtggcaaatgcctcctggctctgaggagaaaactgggttcagggctttcagacaccccctcaacctccctctccttccccttgcacagcccatgctgaccctgtagctactgggtggttcatctctatatgctggtatttttcggcttctggggttttggtttctccgttttaatatttctgtgtgttgtgaagggggcgatgggaagtcttcaaaaatcatgccacccttgccactgtcttccagtatcccctctttatactctgggatcctctgctgccctgaagaagaaaggccagtcaataccataacatttcagagacacctttatcatctatttttatttatttattttgagacagggtctcactctgtcagccaggctggagggcagtggcccaatcatgactgactgtagcttcaacctccaggactcaggtgatcctcccacctcagcctctcaaatagttaggactacaggcaagcaccaccatggacggctaatttttttgtagagacaggttttcgtcatgttgtccagatgggtctcaaactcctgggctcaagtaatccatgtgctcctttgctcacattatttgctgcctgtcccaaggagagcctttgaacctctctgagccttggtttcttcatcagtagtgaggctcgcccctgctacatcacaggatggctgtgaaaatgcggtaagttattgtcgaagaaatcacattccaaattgtacaactcacaatgtaagatcttgctattattgtcattagagctcatgatcagtctgagtatccatctatgtttaaggcataactgaagtactagggacaatgtttatgaatatatcactgtctttgctctttgtggcttccccccagttgcctccaggaagaacaggatcattacaaaaagaatgctgagacaagaatctatgtccagcttttgagatagaaaggaagtcttctttttcttttttggttctcaactttaatattggaagctaggcttcggggagagaccaaattgttttctaatatcaaaagcccaacactgtgggcaatgtcaagacatttactatgagtcaggaatagagggaatctcaagacatgatgtaagagaagcccttgacacatagaaaaaagataaatggatgaagtacctgctggacttggtacaataggaaaggcaggtggtcagatgtgcacatgctctggttttctggttctgaaccaaaatcctgcaaaggattttgaagggttaaacgtaaaatcagggggacttattgcctttgcttgctctgagacttggaaggaggagctcactcacagggtgatgtgtggactccatgaatgcaggaaggaatggtgccatgatagaagaaagaggtggccagacagatgaaccagagttagtattctcatctcatggttcacatgtggcacagaaggagccacatgaccaagtgggatgacaatggcttcagttatctttatttagctgccctacaaaccatctcaaaacttagtagtataaaaacaaaaaccatatttttatgctcaaggattctgtgggtcaggaatccagaaaggccactgtgggcatgccttgtctttgctccataatgaggtctcggttaggaagattcaaatttctgggggctggaatcatctcaaatcacctttccgtcatggctggtgcttggactggaatgcctgaagaacgggtcagctgagcctgttgactggagcacctacatatgacctttccatgtggcttgggcttcctctcaacaaggccgctacagggcagctgacttctaacatggcagctcacagttttaacagagagcattccagtgaaacaaggcagaaactttcatggtcttttataccttagcttcagaggtcataaacctttacttcagccataatctattggtcaaagtatccacaagtcttccagattcaaagagaaagtacagaaacaccacttctcaatggaaaccatgttaaaaaatgtgcagctatgttataacaatgtatctaagagtgtggtttgagaaccacatggacaggggaaaatgctagcgcctgaaagctccagggaaggtaaccaggctgaagaccaattaggagccaggagggctctgcagtcatggtgtcatgtaagagccttggtgttgtgactcaataagagaaaccatctgacccttagagagctgagagaagaccatgagttctccaggtgcagagactagaagaaatcaccagcaaggttccctgggatagactcacatgagccacacctcagctaaatcagcctgcacacactcaaagaccagacccactgcccctcagccacatctccacaaggatagacaggagtccagggagacctgccgcaacctccagggggactctcagctgccccaggcgacatcttgggaaggaggcagggtgctgcagtttgaacatattgaatatttcatggatggagcctcttttaagtagaaggtaattaattaaaccaaagaaggcaaaaatactgtgaattagcaacctatgtctccccactggggatggtggggccccagagaatgatggaagcagtgatggaaagtaaggaagctgtatttttcggctgggcacggtggctcacacctgtaatctcagcactttgggaggccgaggcaggcagatcatgaggtcaggagttcgagaccagcctggccaacataatgcaaccccatctctactaaaaatacgaaaaattagctgggcgtggtggcaggcacctgtaatcccaactactaaggaggttgaggcaggagaattgcttgaacccggcaggaagaggttgcagtgagctgagataacactattgcactccagccccggggtccgtgtgagattctgtctcaaaaaaaaaaaaagaagaagttgcattttcttgtacatctgagtggagtgaatatgaaacacaccagcaaaggacacttgcacatatacttttttttggaagtgatgtcacagaacttctgcagcaaattcatgacagaccatgcagcttccaacgtggacactggaacatctcagtcttaagccacatgtaggaagtccagtattctgaggccaccatgttgtgaggaagcccaagtcatgtgcagggccttgtgttggtgctccagtcagcaggctcgttcttctggtcaccccagcctgggaaccacacatgtgagtgaagatgtctccagatgattccagcagctgcagtcactcccagtcaggtatccccagctgaggcctcagacatggaggggcagagacaaccaccctccctttttcccactttgacatacagaatacttgggtgaaatcaaatgggtattctttggcaccgttaaattttggggtggtttgttatgcagcggggatcacagaagagcagggatggcattgttcttgccagtgtgttctcaaccttatgacatacctggtgccttcaacctccttcaaccctcaatgctcaatgtgtagttgcaaatttaggccaatctacttttagcagaacacttaaaaaaacttggctgctctatctcactgggggccattcttgcttagactgttgtgatcaatttgagtatatatatattcaaatttaagtaaaaatgtcacagtttcacattgtggacagttcctgattaccttatggagaggtcaattttcttccttatttttttagaaaaagaatttggcaaacagaaatccaaagcaagcaagcaagcacacacacacacacacacacacacacacacaaacacacgcatcaaggtcataaattccatgcctagtgctctggagaattgattgtgtctgacatgactagagttaggtgagacaatggccaacattcctcagtagaagttcttcgaatacctgaatttaggagaaagaaacaaagtattggacccatatgaagcagcccctctgccttgcctcgtccagaatccgtcccccgctccccattggtagcctctagttcctggccctcagctggactcttcactgtgcttttccctaagttgttcttcagttttcagagggattcaatgggcagagtgtctggagagacttgggttgtcagttcaaccatgtaattggattgtagaatggaacagacatctaggatgtcagggtgggagaggaggggagctttttcagaaagaaaacccagttcagaaggcagggctggagtcttgggccacaagttgagtggagtgatggtgacgggagagtgggactggagcagccatcgaggttagggagcggtgggaagcaaggctggtgagcaggagggatggtaccaggcttcagagcatgacagaaggagatgggaaccaggacaggctcaagccagcccaaccaatgactccacaaacacaggtggtgagatccttcttctccccaagagccatttcctggaactgtttttgaatccccagtgagatttgagatttcaacgtctacagaaatatgataagcatggactacaacatccccctcatctcctcagcatgggcgtgctggtgagcaggactgcaggcccgagcaggggtgtaatgtgtctgttgatggcgggcctgcctgacaaaccgcagacagctcttggtcaaagccagtgtttttaggcaacacagagtggccctgcctaagaggcatcctccacagtcttcccattccagtctgatgcagtggggaaaggcatcccaatgtgtgacgttcttgagcccatgtcctgcacactgtggtcaggtgtagtaggcaagtgtggcttgtcaattactttaaagagaatgtcttcccaattggcttcccatcttccctggaacaaaagcttttgggattttcttcaccagccttctctcttggtagaattttccattaaaaagctgcctgaagtctgaggcacattcccctctcctaaccttttcagttttgtattccatgtgactgggcccagcatatacatttgaaatagaattatatgcatagaaataggatttcctgattgtgtgataaaagtttatcaattgcctaccatgtacctaaatcctcatttaatctttacagtgcccttatgcgattaatgttattatgacccattttacagatgagaaaactgaggcacagagcaaggaagcattttgtccaaggtcacacagctagcaagtggcagagcaaggtctgagcccagggagtttggcatcagcatccatgccctaattaaatatcaccgttggctcctgcaccatccagctatgctccacattttgattttgaacttatattgcaaaaaatatcaccttatttactcatacagagttccccccactccacaccttactcaacttttcctacaatctgatttatttcaagaagaggataatgttcaaaagtcaaaacttcaaatactatttttcagcaaagaggttccacaatctttatgtagcctctatttctccaggcataaaataaactgagccagctgtggtggttcacacctgtaatcccagctactttggagggtgtggcaggaggattgcttgagccctggagtttgagaccagcctggactacgtagtgagactcaatctctaaaacaataaagaactgaaacaacattccaaagcattgccacagccagaggttcaaatatttatatgcatgcttcttgggagaaaagattacgtcttgattagggttgtggttacatgactatgcatttgtcaaaactcatagaactgtataccaagaaaatggaatttcactgtatgtaaattggaaaattttaaaagttagaatgaaagggcgtaagtatttgtgtcaataattcaacagaagaaaataaatctttcatgtctacttaaaagtgtcagggcagaaaataatacaaatgttctcttcagtagttcatcaaaaatgacgtgtttgtaaattattctatgagatctacttctcaccacatagtgagggtacaagactcacttagcacatttgccacaatagctctaggattcactccccccttcacattgaatatgccttatcattcccataggaaacactggcgaaaaaacagaactgggatttaatttacaacttcatggagatgtttggaaaccaagtgtattatcacatcacctctgatgattatcttcaagccatctgtagtttggtctcaaagaaaagaaagtttggcctcaatttataattgagcaacacacctctgaggctttagaaactgcatgacaaacacacatttatttgtggtcgtgatcacaaaatctattggacttcacataggagaggtcctcagtggcccttatagggtgggctggaggtgcagaacctgtctactctacctggcaacactggcctcaatttccacttcgagcagtgagagaagcaaggttataaaaagcaacttctaattcaaactgacacattttctcagaatgtgaacataagcaagccatttctaattccaatacttagaaataaccccttttgacattttcacaaaaaatggaatgaaatatatttaaatatcaggagaaatgtcattaaatattctctgtcatcccgttccttatatttttaataacaatttcaaatacagaaaggtgacagaaattataggcagagaacacctgcatatccaccacctatttctgttactgatcttttgctatatttgttttattaaatatctattcatttctccatcactgtatccattgatcattccatcttctgtttaacagatttcaaaggttttagtctgtttgggctgctgtaacaaaataccacagactgggtcacttacaaaccagagaaatttatttcttacagttctagaggctgagaagtccaagatcaaaatgccaacagattcagggtctggtaaggacccactttctggtccataaatgataccttcttgctgtgtcctcacatggtagaagggttagctgtctttctggggtctcctatacaagcgcaccaatcttgttcataagagcagagagcagagaccccatgatgacctaattacctcccaaaggccccactctccaacatcataatattggggatcacgttgcagtgcatgaatgttcggggcacacatacattcagactagcctcaagtaagttgcaaaaactagtacacttcagcatgcacacaagtaactagagctcaatatttctttatggctctttgcttaagggagatttacatacactgaaatgcacaaatcttgagtgaacaattcaaaggattttgacacatgaatacacctgggtaatacacacccctgtcaaggtataaagcattatagtcaacctacaagttctcccgtgtctcttcctggtcaaacccccactccactctcaagaaagtactgctctgatttttttcaccacatgttagttttttgatatcatgttaattttggttgcatattactctattgtaccatagtttaaacattttcgatacagtcatgtgctatgtaacaatgtttccgccaatgtcagaccgcatgtatgacgtggtctctggctgcatagagagcacgtaagttaagtgtttcgctgagacttaggatgcctcgaggatggagtggttaattcattcctatggattaaaaatgtttccggaatgcaccacttaacagggcagagacaagtgatgtggtatgctctctaggacctgtatagaataatgtctcctcggcggagcttgcagtgagctgagatcgtgccactgcactccagcctggttgactgagcgagactccgtctcaaaaaaaaaataaaaaataaaaaataaataaaagtataatgtctcctcaacctttttatggcataatagaagaataggctggtttatggtgtaggcttatgggaagagagaggaaatagataaatagatttatttattgaaaataaaagaaagggctgggagcagtggctcatgcctgtaattccagcactttgggaggctgaggcaggtggatcacctgaggtcaggagtttgagacaagcctggtcaacatagtgaaaccccatctctactaaacatccaaaatattagctgggaatggtggtgtgtgcctgtaatcccagctactcaggaggctgaggcaggagaatcatttgaacccaggaggcagaggttgcagtgagcccagatcgtgccactacgttccagcctgggcagcagagtgagactccatctcaaaaacaaaacaaaacaaaacaaaacaaaaaacagaaacaaaaacaaaaaaccaaaaaaaaaaaaaaagaaaagaaaagaaatgaaagatggaattcttaagagctttgggtcaccaaaatgaaataaatatatgtccatgtcaccatcatgcaaaggcactcaagcctttgaaatatactccatttatttacttttcaagagtttgagctgaattcacttagaaaaccccatgttctgtcaatagactaggtttatgatgatgatttttaaacccagtaacctatacattcctcactgccactgccttatgcatgggtggtcactgtattactcccattttgcagatgagggagtggaggtgccaggttgttaatgagctggtcagggactgctggaagtaagtgtcaggagtgagactggaacactgtatacccccacctggctgcctctctcccgcagaacgtgtagattgaaataaaatgagcctgacaggggtttcacccagttccggaccattgcttctccctgcagagctagctttgatgagggccacctccataggaaagaaatcagcagaggaatcagctctggattctcaagaagccaaggtgtattataataattctgctttcaaaacccctgggacaggctaagtagcccacccaccaaatgcacacagaatgaccgtcatctgtccagcagatgagacgcctgggaggtcaagagaggaaactgaagcccatgtggaggcttgtggctcacagtagcctcagccaccaggcctccctcccttccttgaaagctgcagagatgtgcatgcctgcagcctgttgagaaatctggtctcgggccagccaatctgaactccactcacacacacttttctaaggtgtgagctgagaaggggcccccagatgtagatgtctaggaacaaatcccaggcagctggtgggatttgctctctggttactgctcatgcctcttccgtcttccccactcttgcatctactctgtttcagacacttggttttgtgcagcttctcccatgccagacaggaggcaacacccattggaagctgttggtgccgcagcgtgctggcctgggctgagatggtgtgaaaaccctgcccgtcccgctgtttcctaactctcccaggcagtgacagcctcttggcctgctccactggcaacgcctgccgtggggttccaccaattcatcatatctccaatgtgcagttgctgcaggcagtgcgatctcttggcgcttcgctgggctgccacatttggaattgatttgggactcaaaaaggctgtggatcgaggaaactctaaagcgttgttcccttctatttctggccacctatttctgagctgaggtagtgggatctggccaagttgagccaaagtgaaactgctgaaatcaagaaagatagtagccaacgtgacggcagtgggtggtgagaatcccctcctccctctcagtttcgtggactgtcagtccggacgcctgagtggggcctcgctaaccctgcctgctgctcttgctgccaggcctggcatccgttttccatctctatatgattgtttgccctgagcccagtgagtgctgtctgcatctctggctgccgcagacagcagcctgatttctcaagctggacattgctttgatttccccttggcctacagaccacaccacaattctccctcttctcataagcgcaagcatccctttgcagtatctaaaggttcctgacgcagtggaggtcctcaagattttcctccccttaagctggtgcaccgtcccctccccattccgctcttacgcctcaaatccaattgcatggacatcaccaactgcatgtcaaatggtgatgttagaaacgactttccgtaatgatccagaaaaagtcccatttttcacaaaggtttttttttctttctccatgacttagttttacatatgactattgtttgcaataaagatcaagttttgcaatccatcatgctcccttccgactcccctgtccccatggtactgtctcccgctccatgtccgagtaccctccctcctccctcagcccccaccctttggtgggctgtgccaacagtgtagcaagaggaatttctggaaggaggccaaatttggcttcggatcatttctcttcaacacacactggcctctgaaaaccagattctgtttgtcatttggtttgctctcccagcgttgtgtcattccgatggtaatgctgatggatttcaagcttgcctcgtagagtaacgcacaaggttttcataagcacattaatcttaaaagaaaaactgtcagatgcaaacaatacccatatgactgatgttgtaaagacacaaactaactcttaacatccattcccaaggaatattatcttacaggggcctgatgttgcctttaactctcttccaacataggtacttgtgttgcaggattttgtggcacgtaaaaagcttgctttctacaccaaaaggctgaggattaatggcctatctgctcatttgccaagtccaaataataggcttggtcacatggtggtgtaaataagaccatgattacaagaaatatgtaatttaattagttttcagaaaatataatataagcagtccttatgaaaaccaaattggaaaatcattattcctcaagtaaagggactctgatctccgcaaaaccctaaaatctcattagcagatgagacatgctgccccaaactctttccctggtggaagagttcttagatcacaagctgatttgaaggcattttcccattttgttccgaggtttgcaatatgtgtggtatgaattaaatatatgatattactataaatgtgtgccaggccatgatcaagaacaagctagtagcttgcattaatttaatggtgttgaagtgttccactgtaattaagcatctgaaattcaaatagagacagtcattaggctcagcgatacaaagccaccagaccaaagactataaattatttcaaatagaggcctcaaaaaagtgttacagggtctgagatgaggttcttcaacaggggtgagtagtcactggcacttagggccatcagtattaatgaatacggttattaatgaatacattgagactgtcgacggaggagcctgcaatttgttagcaattgccatatctggctaaaaatttctggacaaggttaggcccaggtactgtgattccaccttcctcctacaaggtcagtgtggttcatcacctgaaacagaggtggggccaagcaagacaacttcataaaaagataaaggagactcaagcctttaatgttcactgccaggccctgaattctcagcgagggtctcctctggccgtagacagacctcatggcacttgggccgctcaagagtccagagtccttgcagcctgagaaggcagcaatatttcccaacgctcaacataaggacaagtacctgcttttcctttcattttaatgcccacctttcatggaagtgaaagattgttgtaaatttgaccaggcaagaggattgcttgtccttcagatcattccctgaaggacaaatattgtccttaggaaatattatacaaagcttaggaaaatattgtatctaaactccatggacattttcaagggctataatgttctttcacaagacaatgtaatattttttaaacccataactgaaccattggatttagcaggcagggcaaaatcttgctatcctccttctacgaaacaagccggctgagaaatacaggcctttccttgggacacacagctggtgagtggccgagccggcataagaaccgaggtcttctgatttcaagatcaatgtcttttctaaaaagcaaaattgactcctggtaggaaacagaataaaacttgtgctaccttaaatgactgcatttgccactgtgttgcctatttcacaatacacttttacttattcataagtttgaataacaaagatagcaatgattttagaaattttttagtaagacttttgacaatataatgaaaacaaacgattatttaaggtacacaaatttgcaatccgtgttagtggatttgtggatcaagaagccatccatggcacctgggatctccattaaaatgtaatggatagataattaaaatctgtaaattctattaggtcttcaccttacaaatcatctactaaatatttttgaaaacaggcttagtcaaattccccaattgccttctttgcctctcctcccatcagccgcctcctagtggaggtagtggtgagcactcagagcatcccagtggggctctagagggggctacaggagtcgttcagggactgggtagcctgctggtcagaaatccctctgggaaattctgagtgggctgcatattaaaccttagaggagggtttgatgttcctgaattgagaacaaagtgtttgtgccccaacgttctcatcccttgaatagcacagggaagtaatgtgcactctggagtcaaatgccaggttcaaatcttggttcaggcacttcctggtttgcatggctggaggtgagttgtcatttatagccctcaatttcctcgtctgtacaatggagataacttggttagtttagcctcccagggctgttgtgaagctcaagcaagatagtaagtggaaatgcctggaacgatgcctggcacagaaaagttgctcagcaagcctcagctcttcctagcaaggccaagaaggagcacatcagtttacaaccatatggacccagtggagtgggatagttgacagtgaggcagctgctgtaatttcttcggtaaccaggcaagacccgaccttgaggtttgctcatcagctgcatttatagtccttgtggggctaaacatccaagttggcatttttcttcacttaaattggtaaggtaaagaatgttttatccaaaaggggcctgtttcctttggaagtgactgcgttgtctcctttgtcccctttaattgttcatttgctctatgtgtgtggctgctgtgattttccagtatttcagatgcaggtcctctcatgcaggggcttagcactaggtcataaaactatcctcacctcacgagtttcaccttggaaacagcttctattcttaggtgtaaaaggaatgttccctggaaatagtcttttttttttttttaaacttataaacaccttatcttcttttttttaaaatttattatctttttaacacaggaagcctcttcacctcttttgaaattcagagttccaattctgctttcatgacctgaatggtgagtataatgcaattcaggtgattcccagctggaaatactaaacaacactttttttttctgtgctccagtgactgctgcagaaagggacacttagaggggccttcattattaatgagttacagttgacaccctggcttgggcagccatttctcagtgtgtgctcccatctggggcagctctggcttgggagtagaaatgactcaagtcaatccaccagtggtgggagaactcagacttccttgcactgccaagagtcagatgcagatgcctctgtgccggaatgtgcagttgaagcaaaggatcaagaagtcctaggaatgatgacacactgaaggtcatggtcagagcattgctgcatctgagctccaagccactctgtggtttctgaacagaatctgcttgtggttatcaggaataatgtgataatctctttgctgtccaaagttacccacacaaaatttctgagactagagatgagaaaaacaaatggaacgggatggccaatgtcccattccagagaaaacaaaatgtatccattggtagagtgttttatgcaagatcattatgaatggtgagaggacttcccctcagattaccaggccatcacccatctttgcctcccattacatcaaaacctgacatttttcaaaatcatatccaatagcatctgacagcttctacacatgttaggcttccataaaagttctaaatatctgctttattttatattggtgtgtcagtagggtcgtatgccaataaagctaataaaataaaaaattaaatagcaaggccaaaaatggatgatgaatattccagcagtgatagccaatatagtagttgaagttgaacattaaaatgttggggaaacatgatggagtatagaacagcgcatctgaagaggaagcaggccagctctttaagaaagacaatttgggtctaaaaaatgttctccttgatggacatgttttactggtgttcttcatgctgatttgctgataaagttaaagctggaaaactgtgcttcatatgacgtgaataaactcagcttcaaacttgacatttttttttttttgagatggagtctcactcttttgcccaggctggagtgcaatggcatgatcttggctcacgtgattctcctgcctcagcctcctgagcagctgggattacagacacatgccaccatgctcggctaatttttgtatttttagtagaaatggggtttcactatgttggccaggctggtctcaaactcctgacctcaaatgatccacccggctcggcctcttaaagtgctgggattacaggtgtgagccaccacgcctggcctcatctgtgtattttaagtaagcaggaattgtagctctctaaattgtaggtgaacaggaggatagcatttaggaaaagaaacagagcaatggactctggcctgtctttagagagctctttgagttcaactatgtttgggaacaaaacactaaaagccttaaagaccattttaagtggactacatagtgttttattttcctgtgctccacacaaggggggttggatgttacaataatgaagctcttgttactgccatttcccaggcttctgttggtggaaggagactacgtgctgagcataagtttggcaatgttttccatgaaaaactaagaaggccaactctcaccagactcctatcatcttgtcatattcatgtgatgacccaacttacccaaccctcaaaatgagggacacttggcaaccaagctctgctcctctgctgatgtgaatgtgttccgaaaattcaacatatgcctcctggaaaatctacactcaaggcccagtggaagaatgtacgatctgcttcctgaccttgagtggcttctgatataataagcatgggcaagaaatgcattggaatatagcttgtacatttgctggattgtgctgaagccaatctcagatgccatttcatcagaaaatgtttcagtatgtctcgctaagagattaggatttaaaaaaaaacaaacacacaacactactatgcacctaaacaattaacaataatttaaaaatattttctaacattttgtcagtgttcacatttctgtggtggatcaataaatgaattttcgcagttgatttgtttgaatcagaattcaaacaaggtcaaccctctccactggttgatctatctcttaggtctcttttatttcttctaattttacttttatgtgttacatacccttctgttttccactgccatttatttacagaacgtgttaggccgttgttctgtaaaatttcccacatttcagatttggctaattgcatcctcatgaggtcatttaataagaacctttatcttataattcctgtaagctggtgattagattcaaagtttttatcagattcagttttactccatgggcctggggcttcctactgcaccatacagagacacataaggtccggttgtttctctctttgtgatattaagattaataattggagaccaggaatggtgtctcacacctgtaatatcagtgcttcaggaggttgaggcaggaggatcacttaagtccaggagttcaaaggtgcagtgagctacggtcgtgccactgaacactgcactcctctagcctgggtaacagagagacaccctgtctccaaaaagaaaaaaaaagaaaaagaaaaagaaaaagattgatcatttggttcagatgttgacagccttattgatgaataggatatcattagggccgtgaaagacctgaagacaattttttaactctaaagtgttccgggtatagctaataaactaatatcaaaaatagaaacctcatagagggaagcaaagcaagatgaagctagaaatatggataataatactttaaaaacacatataacaggccatgtgctaagtgctttgcatatatatacttagaacagagtctggtgcattgcaagactaaataatgatattattgccattgttagcttgaaccactttactctactacctccctaagtcagcctggtaatacagaggaggtgaagattcctccctaggcagaatgacctggttgctcaaaagtgagaaatgggaactcctctcctttctgtttttggtaacattgagcctggacaatttgtggaatgtttggccataggtgctgcagagtagggaggaggagtattgaaagttgtaggttggagaatagcattgtcaaaggcattttagaatgaagaactggtcaattactgtacacagaaggaacggcatagaatggcaggataagaggccaagagagtgggttcagagctttggtaatggtcaagctcagacctccaattctatgggttgttcctctactaggtgacttgaagaaagacagattcatagctcacaccacacatttaggttaaccctagcgggttaaatatggaaaatgatgccatgaaagtactagacagaagcatggaataattttttatatcatggaggaaggaaagcttttctagttgtaacacaaaaatccagaatccattaaaaagaaaagactactctgactcctaagagtcaagaacttgtacatcaaaaaaaaaaatcaccataagcaaaatcaaaagacaactgagaatctaggaaaaaatatttgcatcttatatgacagagaagtacaaatctttccagtatgtgaagatttccgagaatctgagaaaagggccaacaacccaacataaaaataaacaaaaacatttcacaaaaccactacaaaagggcttaaacatgtgaaaagatgtttaatcttattctgaagaagagaaatgcagatgtaattgtaataactgtcatgatatgtaataataacttaccatccagccctattagattggctgaaaaaaagtgaccgttgggggcagaagatggtacaacccttggaaaggaccatttaggaatatttatcaaaattacaaatgcatatattatttgcacagaaatcctacttctggaacttatcccacagatgcatacctgtgtgcccacaaaatgtcaaagaactagacacaattcaaaggctaaaaacactttggtacctcagtaagtggaacaccacgcagctattaacagaggctgtgaggttttccatgtgctgttatggaaaaatcactggagtcagtgaatacaggcaagtgcagaaagagtacctggcatgccgccttttgggtaagaaagggaaagaaaagaccatgtactcttatttgcatgtatttgcataaaaggaaacaaaagaagcagattaaaaactgacctcagggaggacagggcagggtgtgagtaagaaggcttctcaaggtggacctttatgtatcgtgtggaccctcaagtcatgcgaatatcttacatatttacaaaaaataaaatttaaaaacggctgagcgcagtggctgtaatcccagcactttgggaagctgaggtgggtggatcacctgaggtctggagttcaagacaagcctggccaaaatggcgaaaccccgtttctactaaaaatacaacaattagacgagagtggaggtgggtacctgtaatcccagctactcaggaggctgaggcaggagaatcgcttgaacctgggaggcagagtttgcagtgaactgagatcatgccactacactccagcctgggcaacagagcaagactacgtctcaaaagaaaaaaaaaacattttaaacatgaatggtactgggtctgaaaggtatacagcttctcaggaaggagaagtcttgtgtaccagtatgtgtaacaggaagccccagcaacaaggtgcaccctgcaaaaagcactcactggggaacagtggcccatgattttgagggggcaattttaaaaatgtgtcatggaaggggaagcacttgagctggatcttggtttcaacaggtgctgattgaggagaagctgacaggcagtggatagcaggaggaaaagctcagaggagcaatgtctgggtgagtgtgggtagcagctgagagcaccatgggcctgctgggagcagagggcactggaggacaaaaatggcccttggggtcagcactggggggccccacctgtccagatgggagcctgaactttattctgcaggtggtggggtgccattaaagggttttgagtctctttgaatccattggagctgcagttctatttatctgttcatgcatttcctgtgtgcctaagacagtgggcactgctccaggtgctggggcactgagatgaacaccactcagcacccagccagtagctggtgatctcctggggagacaggtttatcaaaaatgactaggggccatgtgctgagggaggcactagaagtctgaaccaagtaacaggaaacaggttcaattcattcattttaggggaagatggaggcctaggggagcctccagagaagctgggatgcttaaataaaaagtggaaaggctcatctggtggatggttactgttgtagagattcgggaggagagaatggttagtgttgtggagatttgggaggagagaagatgctggagtcaggaatccaatcagcaaagcaggtgaatcaaggcatctaggagaagttgcctggagatggaatgaagggggttccaactgtacgaaaagtaccagtgaagcaggacaaacaggattaggggtgatggtggttgagatgaggtcatggggaggtggtgaagtggaaaagagggtgccggagtcacagccaggagaggggcagagctgggagaaagagcctgtcagcctcctagggtcccgaaggcctgtgtcatggggcaggagtgcagctggtggctggaaatgagaatcagggctctgggaagaggtggcagctggggagggggctgtgatgttggaattcctgtgagcatggcttgaagcagtggatacagcagaggtcctccagagaggaaaaagtaagactaaagagattgagaattgttacattttagggtgcaggggctgaaaggaggaatgagtgaaggaagagaaaaaaatcacaagatttgggcgatcttggggagattagagccttgagagcagaaaggcagaagggacggagggcaaggcatggcgcaaagaccactccggagaagcctggagcacgttctgacaaaggcagcagcaacggacaaccacagcaagagaggctggctgagccagaggtgaggagagtgaggagggaaacagcactgtcctttccatggagctcgaaagtgagagaagacaggagggtaggccaggggtccatgcgaagcagcggcacggtcccacagcaggctgaagatggggctccctgaactgcagggctgaccccaccatcacataagaagcctgaaggctggacccagcccttggctttggggaacccccagttactagcagctgggcagagacccagaagacagacaatggcggagaagttggtgtctgaaagtcaaagttaaaggaagcaaacaggtgattctgcccacagtcctcccccactgaagcccacgggggcccttgactgggctccttgactcctgcctttgcttccctctgcggtccgacccctcaaggccatcctccaagggctgctttgatttccaggggttgctcccaagactgagtgttttagggtgggagcacagagaggaataacattgtgaaagtgcaactcaactcagaagagattttaaaaatgaggctttgttgctttccagggaggaatatctaggatgccagcaggctaaggcttgcagaaattctgccttagtgaatagctaagatcgtctcacagttagccaagcaaggaagtctgtccgagcatctttcctctcttggcattccgagctcacagctcatctggcttcctcttgatttctcagtaccctcatggttagtcttgaaaaccatgataacaattatgtattatatgaaaattgtcatctattatagctatataatattattataataacaatcatttattgagcacttgttatgcagctgacattgtaccaaactccttatctttttcatctcatttaattgttggccatcctcacaaaatgggttctgttgtgacttcattttccagatggaaaaactgatgtctggaggttagatgacttgcctgggtcacaggatgcaagtgggtgagtcaggaggcctcttcaggctgaagtcaatgttccacctcccaggacttgggcctctcccctcgctggatgcccccctcaattcagtaaccgcactttaacctgccttttgggctcatgagtgatcaacttcaaccctctttcctgctctccgcgccaccacatcccacactgcccagctcctttcttgagccaaactgtctcaagcctgctttcctgtgactttacctctgcgaccacctttgctttcccagggagacgtttcctgtccttcctttggcctctggacttccgcctgtcaaactccacccattggtcaaggtccgtctgagatgccaattccttcctgaaatgccccgtattctttggcggcccctggcctcctcagtctcagaaatgtgtgttcaccttgtttctgcttacagtggggctcaaagtattctgctacagcaccccctcctggttcccagaggtaaatgccctgccactccggaaagggacctcaacctgttctagacaaccagggcggcatttttaaatgttttctattctgtccttcaaatggacaaaaatttctatcctgcgccaggaagagtttacacttgttttgatatcaaaataatgttattttccaaaatcattaggtgaggttgagatttcaggaagacgtgctttcctgtggtgggcccttcctccatcccactgccaagtactaaaaggagaggcacatccaagtttaagaagcaggtgagcagaacacaaagtcctcaaaggcaaaaactgcctctcgccctgcctcaccagcgggtgtcgactgtagaaagaatgaactttatatttgctcaaatggattacacgttaacatcacctcttaaagggtctgaaaatcatttatttctcagcagatgtgggttttccttgtgatcaaaatgacttgattaatttgctcaatgaagctattttttagagctggtatgagcccaccaacatagtttatgttcccaagttctaatttgtggggtccctaggaagttctgtcgcttttccatttcagaaatctacatgtgctggaaacagagccagaccacattcttaaatcgctgcatttgtcacagagccctcccacctccatattcgttgcctttctcttgctgctgagattctaagagacccgatgttaacctaactctgacgtggccctgctgtagctcagcctgtcccctccttgctcttggggcaccacaggctaaatcatttcctttgggcaagaactcccactttctcagaataattcctcctgccagggcatgggggctgtggctggagccacagagatagaaatctctgtgtgattgggtagcaatgattttatctccatgccttcatctttgcagcaacaaaactgttataacaaacccacatggttggcatggcatgggctggatttcccggcaggcagctggtgtactgggaagagttatggagattgatgcctgtgagggatgaggagcagggctgaccaggagagaagtctgactgtgatgcagtagcaaaacagatccaagctgatcttccgtggagctctggtgctgggatggtcctcagagttgtcctccattgaagcttttgtaccccacagtgagtggtccccaggaagggggtgtttgcttgggttttatggttctctttagcctaaggcaatggaaaggaggctctgctgtgagccaccagccttgagggaatgagcgtctcagtgctggtggggggatctgggcatgctgggcaacgttagctacaatacacagctgcccaacctcatggtgaacagaggccatgagctccctacagcactccaccgcattaataaggacgaataactaggagcctgcttatcccaagagtacaacattttcataatagaagatgtcacttcactaaaatcttagacatcaggcacctcagggattgcggagaagttatagatgggggcaacccaagagaggcgtgaattttttgaaaaatggtaatttgggataaatggaagagtcaagtctcactgttccttagtcaggaacgcttgtcacaagcaaaggcctgctcagagagccagtccctgaaccccaagcccaggcttgatttgtaagggactgggcccattccctgagggagctcctggtgaaagaacatgttcagaaggcaaacaaggaaggggaaaaaccacactcaggacaaaaaagcataacagtaaacacagaagtaaaatatcttcttctttctggcaaaggaagagcttgatgttacagtgggtttagccagaacaagccggtgatacctgtttagcacagggcccagcatttcaagaggactgggcctcaggaagaaccatagttctcccatggtacaggaaaatacctggccagctgtggattgccgtcttcctcagctttctgaaactggagagcgtatagctgtcactcaccacctccatcactcatcttctattggcaacagacgctgctaaccctgtttccctagtgagtgtcacttcagggtcttgaatgcagccctgtgaagtgcttctgaaccaaggaagaacatgacaagctaatggaaactcagaaaaatagggctgttttcttctcgagactcaatttaagatggcttgatttgtacatatttctattggcaaatcattcactgcatgtttaacagatgtcctataaaagagacacaaaggccgggagcagtggctcacgcctgtaatcccagcactttgggaggccgaggtgggcagatcatctgaggtcgggagttcgagaccagcctgaccaacatggagaaaccccatctctactaaaaacacaaaattagctgggcgtggtcgtgcatgtctgtaatcccagctactcgggaggatgaggcaggagaatcacttgaacctgggaggcggaggttgtgatgagctgaggtcatgccattgcactctagcctgggcaacaagagagaaacttcgtcagaaaaaaaaaagacacaaattaaaatgtattagttttttaaaagtatagaaaaataagcagggcatagtggcttatgcctgtaatcccagcactttgagaggctgagacaggaggatttcttgaggccaggagttcaagaccagcctgggcagcatggcgagagaaaaaattaaaaaattagccagatgtggtggcgtgcacctgtagtcccagttactcaggaggctgaggtgggaggatggcttgagcctgggaagtcgaggctgtagtgagctgtgtttgtgccactgcacttcatcctgcttgacagaggaagaccttgtctcaaaaaaaaagtatagaaaaatagtgtaatgagaataatggccagtgattcagcatctcctgtcatcaagtgttttctgtggttaggtgatttggccctggccatgaccctatcatatagatgaaaacactgaggtccatgagatccatgagattaagcctcaggaggtggaatccagaacatggatttcagcctgaggacttttgagctaaaaaaaatggctggacttgtccatattgtacttttctgtagccaggtggttttctgagttcgaggtgcatatgcattttttgacctataaacactgagccttaaagagcatgtgtagatcctctgtgtgcttactcgacaatgaaatacacacacacacacacacacacacacacacacatgcaggcactagccatgggtagtagctctaacagtgtctggtcacaaattttttcaaccttcctagcagcctaaatactagagctgcaaagagaagctctgaaggcacaatgagaacagagggtcattcattaaatccccactccctctgtaatgaagggcaggtgagtacagcctaaaatggcagaagaacctcaagcctgagtcgtaacaaaacgccatcaaaccctgcctaaagctattcgtccaaattaaagttctgctgaatgtcaagccccagccaattccacagctcctcttccacagttacctacaccccagtttaaagagaaagtaagacgaaagtgcctgattcactctgcccaaatcagctggctgacatcgcaaacatgaacacatatcccgcacatgaaatgaccagccccttgcaaaacgaactgggttatattttggataacaaaattgcataacagagattaaaccacacagaatttgggctcagccagaggtgttattatgcaaaacgaaatggacagtaccgttacagggtacccattacaggggagcaaacctctcgccttgttggcctgccaaaaagagatattccaagtgtagagcatttcccagtctgacggatgttaattcaattagccactttgccaatgttgaaatgcctagaaaccttgtcaaaactcatttcctcagcatacccgttcataaaatctacagtcctgcaccctcgttcagcatctgttactgcatttcctgtaaccctataacccttaagcttctgggtgttgccgagaaataccatatattaaatgtcattttaaggacattttagtttctgttgttgctattattaattttcatgtacctataaattattttaacatcatcatataacacacagttaattttactaaagtggatgaatgtaaagaatattttacaagatactttaaaaaaaccgatgaggtttctaaaatatgcatttcaagatcttctcaagaggtgtccatgcaagattttaaaagataaatgagacccaaagcccctcaagaatttgtgtacttgctcttttagtcttaatagtgacttagtaacaacattttacagctaaaaagaatctgaaaaaccattgcttacaatgctgtacttttatgtaccttttgaggacagaaaggtcctacagtgatgcggttacttccatattttttgcaacttgtttaaaaaatgaaatgacgtttgtattttagaataagcgtacaaaacaataaaaatcaaatcaaatcaagcagtttagattttaacatgtattaccaaggtgaggctagcgaaaatgaaaaggagctttcttttagttgatttctgagacttggaagagcatatgtgaagtgttctatgaggaccacaagtctgggtctggataaaagcaacactcagatctgcaatgcagtagtccctagccagtgtgcaaaagtcacccccgttctaagctgcatggcaatgaaataatgttaacaaccccactagtcataaagatacaaactacactgagcccttcagaagattctgtatttctcagatggcatcagaagcttgagggttatgattgctctgtgaccttacatatctagagaactgtgctatttaacagtgctaagagtagagttcaactcccacctcctcggacaatgaaatcattcggactccctcactgggtagcatttatgattcattgccacctctcccaaatttgatctgtcagcccgagaggctaagtcagttgctgactctctgctgctccccaacccctccagcttactgtacagtgaagctgtacggacggttatacctaagcaggaggctggggtcacctgtgtgagggcaggaagacaaagggatctttaaagatgacaaacgtcaggcagccaacccagcctgggaaggcagtgttctccctgtttccaggaggggtcaaagtgacatagtgtgacaatgcccaggaaggctgttttagacatggatttaaatatattttcatgagccactgtaaggtgttcacagaggtgagaccagtgagccacccgcctttcctctggcatccaggaaaacacttgtgaagcaagaagtatcatgttacaccagcccttctcttcccagtttctcctaaaacagattctccaacttcaatacgcattagaatcacctgggcagctcttaaaaatcccagtgtccaggccacagcccagaaaaattcaatcggaatctctggggatgggtcccaggcatcagggccttctaagtctccctttggtgaattcaatatgcagcaccagttgagattcagtgtttcttaaagaaccctttacaaaagcaggactggttgaagtggtgtctattcaacggcacagaactgaacatcggctctaaatgactgttcagtcggcttattgcaggactggggagaagcactcacccgcggtggtgatgcggctcttttcctgcataaaatctacagaccctgtctaatattttccatgccaggcaatgagatcacaaactccaaaacattaaatcaaaaccggaggcattacaggtcttcagtaaaacttcatagtccgtacacaaggggggggagagaagaaaattaaaaccatcaccaagctgcggacatattatatgtgtgagtgtgtgcattttttttgtgtgtgtatgtatgcatgtacgtatgtatgtatgtatgtatatgtagcaagcattgggatgtcatagcaattagagacaaaaatatgtagaacaataattagttaaaagtgattggctaggcagacagtaaaaagttactcacaagtaaaaagaatccatttgtgccttaaagaaagctcatcataaaagatccttgattcctaacaaggaaaatgatttatgccaaggtgggtggaaataacagtgatatacatatgataaattaaatgaacatgaaggagatcctactttcatgagaatattcaattataaaggacttcaagacttctgagtttacaaaaccgtgtaacaaagtctttattccaaaatagcggtgtttctaaatagtatgctggatataaaaaataaaagccttaacatctaattctaatcataattttaatgatggaagaaatggataactgaagatgggagcagtactttggttttaacacctgcagtagctgcaggtgttagcgttcctttagcaaaccttctacctatctcattttcagggcttgaattatgtttttgtgtgggtgtgtgctgaagattggagaggactgatctttaataagaaactagacaagtccaggcaaacaaggactggcttgacattgtctttaatcaagacaaagggctccacatgggtccttcaccttccttgtccattattcaggttctattaccatgtaggaacagaatttccaaagcactacccttgcattcaagggcaacacacttcaagctggttccaattaggctgggccagtgtggatgtctcacacgcgtcaatatttgcagctgagctagtcagatctgcaggggtatcctctagacagcaggagacccttcttactgctgcctttgtgaacaatcctgcaggcatttacaccacctccctctcgcctcccttcacaaataccatttctatcctttgtacccctgtggctactcttagatctccccttttccaaatacctgggagatatgccacatggacatttcaagtttcccaaataatttccattttattagtgacatttagacttaatactgtcacttaaacattttttgagtgctcactgcgaaggtggaattttgacccatgtctggaaatttctgcaggcattaatgttgatgaaatgaaattaaatcagatctaattgcacagtagaggtcattttatataagaggaaattgaggcttatttgacatgctcattgccagggaaagagagagacataatagcaatctgcagaactcgatttggggctagtgagaatatacacacaagaatggcaagaatgccagatcctcctgaaggctctagaaaccgtttcttcctacaaagggcaccaaccctctgtagtttatttttatcagccaaattccacgtttaaaatatatctactccaaagtaaatgttattaatgtagtagtcagatccctgcattgcagggtagaaagtatctcagatcttcgttgccaatactcaatttccccctatttatttctagtgcaggtttcacagcaaatctgttttctaatttgcttttttcttacatctctgaacagaattgaggagcactggtcttccaccgttttgttaatcacattgaaaatgttcacctattcttttttattcatttcactttaggaaaatgaaaaaagttgtcctggcttctctcgccatgcattgccaaggacgttgctcgctggtagtggccagtgtcagcggaaacggtgctccatccaccacagctgacccgactcattttcgataataaacatttccagggtagcgaacatcatggaggcctaggcaaagaaccaactttacgaccgccttggtcagcagcaggccaaaggaaaataagccgcgggaatgggtccgcgaagccaaggacgttatttctcgctcttgggggctctgttttaatgccagttggcagggtcctcaacaccttccatttggggtctggagagtctgtgtgtcctagtcaggagaggcaggttctgtgcaaaacgcactccccacctcgtccttgaggatccactctgttgggaggacgctctgaccttgcgctccgaggcggcgctcacaggcgccaattcagaatctagtcttcctctccccttcctcgctccctccttccaccgccgcagtcattccccgcggagtttcgttgtgttgttacacaagccagcttttggtttgttagttgttcgcattcccccagggtttgcagctccccgatctggctcagctcttcttcccatagtttctttgcagctagcagctcctcatttctcttttcgtcaattttcttcttatttttaagtatgatgtggcggatcttttttgcaaaactacgggcatgtgtacgtgtggagcttggtactataacctgatgcataaagtgcgtttttagcccgagctgcttttttattttccccttcaaacgtaaatttaagaagaaaattaagagactcaatttgactttgattttgaaccacaggactcatggctcagtgctcttaaaactcttaaaaacacagtaaaagcgcaggtcctgagcagagccaggactcatgcaggagcgaaagcgggcctattaaggcctgaggctaggacgtcgtgaggaagacccgggatcccggccctgcggcccctgcgggctgctgctggtgggtaccagctttcgttgttaggcccaagtctggccagggctctcggggagtgccacctgtgttttctgccctctgttacttcccgcaagaaccgaaatgcgcacctgtatgcccaagttggacttaaatcagctttttcttaaggtttctcctggagtccttgaaatgcatgggcccggggaacatcccggcctattgcttgttttaactcccggaaacaaacccaccaaaaatcaaagccaagtatgagacatgaagtgggggcgactgtagctccaagagcggccctgtcaccgaacccctgggtgtttagcagtgtgaagtttcgggtgttgagttcacggctcaggtggcgtgcagcaagggagttctcatcagtaaccccccttgccgccaacccccagtccccagaagggcaggcaccccttcgcgcctcctttttgactcccgctttcggcaaagagtttacctctctttcttttcctgccttgggaaaactgggcgagggcccgaagcctctggggtaccctcagatccatcctctgccctgctaggagtccagccccaggcggaggagttttgccccaggtttctgagtgcgccctcagctaacaggctcccgcgaccctggaagcggaactttgttgcactccgcttccagaggacgctgaaatacggtgccaaacccagccaagcaaaaacgcagaatccgcgagctctttacctctgtgcgctcagcgctgactagtagctgtccccgggccatggagagggctaagctgcctccttgggaggtgggagagacgtttcttttccttctgcaatctcatcttagggccatctctcaccaagcctagcctgcagctcgggaacccgcgatacccggccgggggacgacagggggcgacaaactgtaaggttttccctatgcccgaccgtgcagaaggctgcagcgagggctgtgtgctcccgatcgcgcacagctggctgcgggaaaggggccaggattgagacgaaggctcgcggactctgctaccggggagaaccaccccctctcatcgtgcgcaatccccagactcacccctctacagtagcccccagccacgggcggccttcacggggacgggggcggagttttgtcctggactgcgactccttgccacttttccaagctcggcagcagaggtggggtggacgttcccctgaaagggtagttgggcgaaccagctctcacggtgtcacgaccggctttatttcctcgtctttagagtgtgcctgttgactcctcacctactggggggaagaagcggctttagctgcttttccggatcacgagtatccactggactgaggcagggatgtggcgttcctttatctcagagactccaaggtctggaaatcaacctttcttggtatctcgcgcccgacgaagctagcagattccgcaatggagagcactgggcagggtgcgtccccactccccgcacccccggagccccgagcatactgtgcgtgcttagtcctctcttcgctgccttcgcggaactcctggcttaggcgtgcccactttaatccaaaccattccctttccctgttccttactccaaacctacgctgtcatggacaggcctaatcttctacatagcttcccctgctcccactctcgcaccctcctgccagtgcactgaccctcaaacctcctccaggtctccaggacctcccagagccagagactgtactgtgttcatgccgccggagaggaagagttcacttcttttaaacctgatttttctttttccaggagtaattcttgtctgtggccccaccgcgtgctctctctagagagtccaggaattatgagccagtcactcctgacagatacatttagacaggtggattaggagccagggatgctctctggccctacagcggaggcaaaggggtcggggcctccgcagccatggctccccagggtgggctgatagggtccatgtgctcctcagccactgtcaccgcgctggcgccatactcaactctgggtggctaaggagagctagacccttggggtgggcaggagggaggggaagagggttctctcctccaggggagcgctgggagtctcagaaacctcggctgttcctactctctcccctatgccctcttcctggtctagcacattcagcccaatgcctttggtgcttactgggctcaacctcagagctctcagatcctgaccccctcaaatcagttcatgttcaaaaccacgagtttcctcctcttggccctcaccgcatggctcccggacacagttagctgcacaggttggggagttcagaactgctttggtgcagggtagaaacagagaaattgttgatgttcaatctcaggggtgaataattcagggctgcgcaaaacctcatttaaatgaaggagaaatgaccattctgtggtttaacagagacttcctgaagctgcaggtgctgggagaaagacgaggccaggccacctgggatagagtggtgcgagattccaccgccagggagaaaggaacttgtccttcagacctagagctggagctatgcatttggcctcccgccggtcgcgcttggggacaggagggcgccggatctatgcgccccttagcagcagatcgggatccttttgcctcctgccccttctgtcactgcttggagagggatgagttctggtggctgggcctggctgtaggagacaggatttggaccgtgcccctctcgcatcaccgaaatcacccccactattccaagagtggttggctattaaacgtgaagatttcctgagagaaggattgaggacctggccaggaatgggacacaagttccgccttgtgtcttcctgacaggagccctgcaccgcgctggacgctcaccttgacactcccagccagctggggtactgatcccacccttccccggccgctgccccgggagtggggaggtagagagagccacacccgaaacacctttccacgataaacttttattctctatcttattattaatggtggcggaaataaaactaaaaccaaaacgaaaacgagtactagtactaacacactaatcaatttgagatgacttccccctcattcccaaagctagaggaggaagggggctgaaaggggctcagagcagtggaaggtcccaggcccagctggggttgggacgtgtgtgtgtgtgtgtgtgtgtgtgtgtgtgtgtgtgtgtgtgtagaggggtgggttccgggggggtggtggaagagggccgaggggggaggatagaaggagggggtagagtttcagggcggggaggggggcgctggggcgcagtgacgggaaccaatgagctgccaactcgcgcgtctccggcgtgactgccgagattgacgtggaggacacgtcaaattgattcccgcacgctgcagcctcccggtcagacgaatttctcccaatcggatgaagttcaccctgggcctggggtcgcgggcgtggagagtgtcctgggagggggcagcagcggcggcggcaggccctggagcgggcggcagcgcgctccgctgccgcgcacagcgcgtctccagcccgcggctgggccgccgcggctctcggctctcgggcgccctccctctatgcctctcacgcggcggcggcggcgcccaagctctcccggactgcgccgggcccagccccggccaccccggccaccccggcgccaggcagctggccggcccgctcgctatgggtaaggggcgggcgacaggcagggctcgggagggctgatgaggtgggtcgggtccgcctgcctcccttccctctcgtccgctttccctgggcgacccagtcctgggtcctggagaagctgcattctcctctgatccccagccttcagggggcagttgagcaagtctgggaagggagtgttccaagtagacgcgctaaaagtcgcgaaagggcacggagggctacaatgcgccgcgctccactccgcggctcctctgcgcccttgcccactccaagccagacccaggcggtttgcccttggactccgagctgtctggggacccacaggtcacctttggaagtgcgcctgggtgcagtccctcgctccgcgtggggacccttggctaacccgccgggtgttttctccccctccggctcactcttgtctggcgcatccgcagagcagacgtatggcgaggtgaaccagctgggcggtgtgttcgtcaacggccgccccctgcccaacgccatccgcttgcgcattgtggagctggcgcagctgggcatccgaccctgtgacatcagtcggcagctccgcgtatcccacggctgcgtgagcaagatcctggcgcgctacaacgagaccggctccattctgcccggggccatcggggggagcaagccccgcgtcaccactcccaacgtggtcaagcacatccgggactacaagcaaggagaccctggcatctttgcctgggagatccgcgaccggctgctggccgacggcgtctgtgacaagtacaatgtgccttcggtgagctccatcagccgcatcctgcgcaacaagatcggcagcctggcgcagcccggaccgtacgaggcaagtaagcagccgccgtcgcagcctacgctgccctacaaccacatctaccagtacccctaccccagtcccgtgtcgcccacgggcgccaagatgggcagccaccccggggtcccgggcacggcgggccacgtcagcatcccgcgctcatggccctcggcacactcggtcagcaacatcctgggcatccggacgtttatggagcaaacaggtcagttgtggcggcctccgtagccttctattaaggggcagaacctggggcgggcaggcttgcaggagaggactcacactcgctctcctcccgggaccggttctggctcaggggagggctccacactggccagggaggctgggggtcctgggccttttgtaagagacctcggacatcttgaactttttatgacaaatatggaaaatatttcccaaatagaagagcaatcgccgaccacaaatttggaggcctgaaattgtgctttttcattcttgcaaaaagtatgcaagcccctgttgccaaatctaagggggaaaaaaacccgctcaattttgagaccctttctttagctctcagaatccttcacgatttcccaagggttctgtcccccactcccaggcccagtggctcttctgagttaaaggaaaagggatcttgtggtcgattgagtggcctacatctctaaggtcctgtggccttgcaggtcctggagtttgcggtgatggctggtggggctgcagccaccttcacaaggatttgtcatttatctgcaactaaagcttaacacactataggtcaagtgggtgacgaggaagatggggaaggcgggaggtttggaacaactttgatgcctggctgggaaagaaaccagccagaatcgggtctggatttctttgcgctctccccagctgccagcagctggccaggggatggcacactcttaggtgatcagactcaggaggagggcaagaagcaaaattcaccatagcctaggaggaaagagtggtggctggaaagaaactgtgagtgctcagctccagcagcagcagcgcctctgtggccctgctctggctttgtgtctcctggtggctctaacccagcctaaggctaaagcttcccatggaatggcaggggtctggaggtgaccccaccaagcctgcacgcagatctggaggtttcccttggttcctggcacacacaagggcccggggagcagctgtgtgcttctatctgacccgtggggacaacaatgttgacgcttcttttgggaaaccctgggcgtttccagaggcagttctcgtagaatcgtctccctgccctccagaggcttgtgcagatgttgagaaatcaatacaattttcatgaggttgctgtagctttgaactcggaagtttctgggagccgtgtctggacaatggagcggccgctttggccgagtctgcccaggctttgactcagcagcagcctcccgttcgtgggaaaccggttgaaggctaggaggaccgggcagcaggcctggctgcctttcctccgccccacccggagtggtgaacattccagtccctgccgcctcctggtggagtgtcaggccacctacaaattttgtgggacccctggccgtgtcttcagatacaaattgggtggttggccacacgtgtgcccagggcagattcggaggcaccttttaatccgtcctctctctcctgcaggggccctggctgggagcgaaggcaccgcttactctcccaagatggaagactgggccggcgtgaaccgcacggccttccccgccacccccgcagtgaatgggctagagaaacctgccttagaggcagacattaaatacactcaggtaaccaggaggcacgtgaggccgtgaccttaagtagggaagcagaaggtttgggcaagtggggaaaaagagagagaaagaaaagaaaaaatttccaggcagagagatggttgtatctggcagccggctagcaagcgtcctttctgtcctttcctcaagcgtactagtttgggagagtctgactttagaggggttgacttgcctttgccaagatagcttagctaaaaaaagctggaactccagatgacgaatccacagtcaagggccttctttctctaaatcccgatatgaataccatgaccccttcacatcgttatttgtaacagtttgagtgaattcttagaaatcactttgccaaagagtcctgactaggaaatttagaggccaggcctcgcatggggataatggatgggcacaggacgtgggggagcgataatggacgaaaacccccgtctcagtgatggcgtgggctagagaaggcaggattttctgctgctgacggtccctctctatccccacagtcggcctccaccctctctgccgtgggcggctttctccccgcctgcgcctacccggcctccaaccagcacggcgtgtacagcgccccgggcggcggctacctcgccccgggcccgccgtggccgcctgcgcaaggtcctcctctggcgccccccggggccggcgtagctgtgcatggcggggaactcgcggcagcaatgaccttcaagcatcccagccgagaaggtgaggagcgcagggagtggggcgggtggatgctggaagggttaggaagggtactggggagcgggtgtgagcctgggaaaagggagagcgggtggggaagaggtgggtcctgggcatgaacccttcttctgggttaacctttgagcatgtagcttcttggagcagattagttctgacaggtgtccctataaaggtacccgaggttgagagagactggccccaagactgtcccctccacttatgatgggagaggtgaaaggaggtccttctggcacacaggacgcgtgggtttggatccggttctggcaccttcgaccaagttcctgcttctttctgggtttctgtttctccatccagagacacgtctagcaggcaccctccaggctcacctttctgtagacctgttctggcacctaagccctttaggtggggttggacttgctagtggcacctaacctccatccccagacccttcccgtctctgccccactgcccatctgttttttccaggttccttagagagaaaaaaaggcgtttggattctttttcttaaatacacactgtgggaaagtagaggccatgtgaatcagtgtcctttactccaggctcaggagctttctgtggttgtgggtggtggtggtggtgggcgggtgggggggttctctctttctgtggaaaatgtgcctgggagtcttgcctccttttccgcttcctccttctcttccttttccataagtccacttcctgaaaagtcgaggaacagattttaggtatttcactgacagtcagcagtgtgagggggatcttctcacacaaccaggagggttccagtttttcctttaacttgggaaaagctcaccagcccttgagtcctcattttctttgttgttaaaaggaatggcttgatttgctaagttcaaacttgccagtgcttaggttctgagcaccagaaatttgcaacttcaaccaacctgggaaaggaaagggtcaccccaggtcgtcccagccccagcagagaaagagacaaggcacaaacctgggggacagcgtggagttcccagattataaaaggatttttactagctgctttgcctccacctgtccagggctggaagcgaggtggatgtagtggcaggtggcagtgggcaggcaggggacaggagggccatcctccttggtgctgcccaggcaaaaagtgctatttccaagtagtcttgataagataggagggcatgccctggggagtgggggtggggtggggggcaggaaggaaataaagatgccatccacaacagtgaaatgaagggagaaaaatactttttctatttctacctttcctagagcacagacatcctgggatattaggataatgttcacttgcctagttacagacaaatccaaataaggaaaatttataaaaattgggatttagagctcttttaaactttaagtttaatttaaataggatactatcatttactcatttatagaaaaatccaagtgaaggaaatgttaaaagttgagagtaagaactcctttaagctttatgtttaaggatagttaaggggtcgcagatgagcgcttcactcatcctcagcctccaatcaacctgttttctcaacaactgaggttatctgtcgaaatcgaaatcaaaataaaatttaccacattacacaaatcacttaaataagcaggttcttttgaattaaaaatgtataaccacagatttgaaatatttcactgggttcatcttaaggagaaggaagacttagaaaaaagacccacagtcttcagaggaatgcatttgttttcaatagagccactttgccctggaggcattttaagctctacattagacacaaattataaagtgcagataataagccaaaggtaacacacacagttcctaattctaaactacctgtcttaatttgtggtggaagttgcggggaagctgattttaacattaagcctcactggtgattgattttctttagaagacactttccttttcagaaatacagggtcattgaatggtgctggcataagtcccttttaccattatatcagtttcctattatgtaatatcccacctgtttttaaaagctacagcaataatttgttactctagttattaaattaataatttaattttgtggtcctccaacttctttaaaggttctaataaaagataatcagataacttggggacaccattagcaatgatttctcaagctggcatgcaactgtttgtgttcgaacaggaatgtagaaataatcattcattatctatctatattcatagcctgagaattacatacatgcttgggttatggatttttactccttactggtagaacagctgacttcaaagatctattccctcaacacaactggtctttggaaagacagaaaaataataagaatcactgccttttattttctgatcagttcttaagaaattaatatcttcaaagaaacctgtcccagaggacaatttactatcagcaattgttcaattcataagaatagtgagaatagtatttagtgaactccttttcagtaagaaaaaattcttctgtgtaatgaaaagcaatttaatacaataaatgctcagtaaaagcaaatacctttgatcacctaacacatacacaccacacacgcacagtgcaatatatatcaatatgtcctccaaattagtgcaaatgaacagcttaacagttaccctaagtgaaacttaatcaaatgtcaaatcgaaaatttagcatttaattagatattaattgattaattgtgttatttaatactataattcatttttttcttattttttaaaaaggtagtgagtctgggtttcctattatgtaggtaaaaagcatgatttacatttcccatcccctgaaaggaaactttaatttttgggaattgagaagaatagaaaaagtttcgcttaatcttcacttggagaggctgacattctaggaatctccacccacatccaaatgtcttttcatagccagggcacgaccatctccccttccccacccttaggtgacagacaccaccagatgctccctcaagacagctggtatttacaggatgttttcagagaccctcgaaacctcagggttttaagtccctcctcgtggggctctggaatgactaaagatttggaaatcaaatctataagatactgcatacgcacaaagaaaatgtattgcttttatttgttaaagataacttgcagcttcgctccagttacctctgcctcgggattggttcttggaagatcctaaaagtaaactttgtcaaagagcactaggtcgctggcattgtcgcacccggacgctggcaaccccggcctccgtttgacccagccccggggatcccttcccagacccgtgcctcccctcagcggtggtctcagagtgccctgcaattgcagttgaatatttaaaaaatgcctctccccattcttagcccctgaattaaatgagcctgacctaggccccggcctccgagggcccagaagtacccacccttgttgtcctatggagggaatggagggcaggaggggccctatgaggaaggatggcttggacagggctaaaaacacagcaggattcgcccctgtagggtgggatgcagtcttcctgggtgtttatttttcatgagttcagtttcttgcttgtctctaaggtaaccgtcccttggctgagaaacctccacctcctcagatgttttctaaacaggtcctcactttgaagtgtgtgtccacggtagaaagaaaaggtctgaatacttgttggctgggcggccacaactttgtttaggaaaaagagctgagagccagggaaaagcagaggggccgctctgtcctgggaaggtctttagacctctttaaaacctcaacgaaaccgtgtgttttcttttttttttgtgtgtgtgtgtgtgtgtgtgtgtgtgtcttgcacagaggtggttggcccagctctgcgcagccacagcaagttgcgcctgaggctgaggcgagggaagctgcaggagaaaaaaaaatccagagttccccttacttcaaatcgaggcgctccaagctccccctttaaaggaggacttggggaaaaaagaaaattgaaaataggcccctgtaggtataaacaaactgtggatcctagtgtaggagaagcagagtggctcaaggttgggaaaggaaaaacaggcttgcgcaatcgtggcgtcactttctggcttccggtggcaaaacttgggccccttcccaagcccctaaataatagagtaaggcgcagaatactgcccgatctggcaatcccactgtcacttaatccggaggcccacaggtcccaggacgtgctgtgcccacagtggtgagcgcatctggatccccggacctcgtgggcacaacgtagtctgccgctcacttaaagcgcaactgcctcctacgtcggaggaatccaggccgctccagggaaatctctggtggctcatttcccgcaagatttccccctgcccacagcgagctccgagccgcgggtgtcagcggactcgacgcattggctgctcttcgcacttgtgcgggcgcctggggtttggaaagggtgagggtccgcgcaacgttagagtcctgttcccttctgcggaagtcgccatcagacctgaaaccttcccagccctctgcgcccttcacttcctttactgagcaggtggtgagggggttggacggcaacgggaattgcacctggccagcggtcagtgtttgcaaatggccttgcgaggagtcccgcttgccaaggctctccttgcaagtggctctcctagcgggagaggaagggctggtcgcccacggaagcttggggtctctggagagcgcgagtctctgcttcactcttccagagccttcaagggttgagcgctcacgacctcgctctgcaggcgtcctgagtcccagtgcctctcgcactgcgcggcgctaggtagtgatccgacgcctctgtgcttcctcccgcagtggctgacaggaagcctcccagctccggcagcaaggccccggacgccctcagtagcttacacggactgcccatcccggcctcgacctcctaggggcagctctccccggacccgagcccggagggaacggcaggcggacccgggcgcacaggtctgcgcggcggccccggcaatcggcacgggcaggatcggaggactcgcggaggaggaagccagtgccggcccgcggggtgcacgcccagccagcccccaggcccagccctgcctctggccggacccaccacacttcctttattggtctgggtttttaggcttctctgaacttgggttttagactgccgtaccctcctcacaatccttgctctgacgtggcctccttcgctctgccagcttcaaatttcttttttgtcactcccttgtccgtctccgtctcgcctctctccctgtttccttcccccctctttctttctcactctccctcccttccctttctctttcccttcctccctaccttccaccccggctttccccgaccttccagggctccctctgcccttccactctcttttccttgctccgacctctgctccagtcccgcttcttcccccgtctcctctttctagtcctctatatgctatcagccctttttcctggtccatccctgtcgttccttctctctctgtctctggttctactgtcaagggccctagttccctttgttttactgcttccccaaccctccctcagtccctgagagccctagagccatctcggtgacagtcccttctctggcacctgggactttgtagccttcactcctctgagcccaccagccctaatggaggggggctcaaacctaggaagtggacagaaaagccacagcctttattttgtattttttttgtaataacaaaccctaaaaaaccctccatgaactgtcctctcccgtcgatccccgcagcatattgtctggaaatctgttttctttctcagagcccagtggccgccgggcttctcttcccttctgagatgatgtcaccccaaagaagactggggtaggagtagggagcacaggggttgttggtgttttcagtgcttagaaaactgggttgtcctgcaggtgtctcctcccacccctccactcgcaacacttgctagggaatccgaccagtggtaaacacatcagcactttttggtgttcaggggtcagcacatttgttaatttaaaccacagactgcttccaggtacaaaggttcatttggacttctggtttgcaagggatgagggttaaaaaaaacaaaacaaaacaaacaacaacaacaacaaaaacaacccagaaagtatcttctagagccagccgcaagagctgtgagctgcttccaagttaggcgagctggtggtggtaccctggacataatgcaattctgtagtcagagcaatatccctggcgagagcctgacatcgcctgttaaaggtggctgcctctgaataaaggaaagcgtctgaaaggtgtgtggtgaggtgagcaagtctgtttctgagcgcagagtgttgagttcttactccgtagctaccctctcccctgagttcctaggatgaacactatcaagggaaattatgcagaaaccaccttgaaatgcagttaattctgaaaagagtaaaatgggcaaaaggcaatgagccagaatggaggatttcttcagaacatttctagtattctaaaagctaaagaagacaatcccaggctaccaagtaatctagggggtttgcactacaaaggggcttccggctaattgtttttttttcctgcctctgtttgaccttctaaaactgatggaagagatttttgaattgaagttgctgtttgtgagtggagctgcctgcttggtgtgtgcactggtcccacctaggggactagtggtaaacagtttttgtttcaactctttttgatagtatctgttgaaggtatcaattataaaaaagtacttacttttttcctagagagactcttcttctcagattcaaagtctcttgtctttttttttttttttttttaaagtttcactttgtagacagtgttagtgatggctagggatttgatttattttctttagaccacatagcaaggtatgaattagagggcttgtgcttggaaactgggtgacactatctcatcagagaggcaggattgagacttggactttgagactgaagtcctcagccttccatggcagcatatcctgtagaagagcttgtcatactgataataggaaaaaagtatgacagagaagcatgttcccaagtcccccatcctctcagcctgtctccttgtgcttagatgagcattgcatgctcagtggtgacatcctggacagaattttcatgcacccatttgtgctgcctggagaaggactggcttgctcaggccaggaggaagacatcacatccctttctgaaggaatgagaagaatctatatgacaacttctacctttgagttgtcaccatccccatttccctgctatggcccacttctgtgtttgagctgatcagggttatgggggagaagagctgggaaatgcgccccagggtggatgcaaagcacctgtgttttaagtgccacctgcaaagggaggcatttttcaaatctgcctcttgttccctgtatcctgtggctggaggcgggtctttgagttccctggctctggggcgagcattcactgaggataggcagccttcgtcccagagccagcaggctctgacatttcatgtggggtgtggagggacataccccctctctcgcggctgggggtcacggaacatcttagtgaacttggcttaaatctctgctccactgtatgtgtcaggggactgggacctcttggaacctgtctgtgaaatgtagccttcaatgcagtaacgcgcacggtgacctggcctgtaggaagactgccactggtgtggcctcacctctctggagacaattttgcttatctgttaacaaaagttagaggaatcacttgtaaggttggtgggagacccagaatttaaatattttccaaaagatcccattggaatattgcacttttgctctttgttcgtatggatctgtggaggaactgagagctcataataaaattatgcagcaccacgtcaggtagaataatttgagaaacaatcactccctaaacgcagtttgtctttgcctttcatttttttaatttaagaataagttttttttagaaaaatatagagatgtaacccaaagaaaataaagacataatcagatagccctctgattttttgaaagaatagaaataatatatgcgtatcactaaaaaactcaagcagtacagaaacattaaaatgaaaagtggaagttcttcctgctctcatttttgttcttaaaggtgaatgctgttatagtcttttgtgaatctttccaggaaaaacatgcatgcgggaaaatatgtttctgtctatgtgttatttgaaagtgcacactaatgagttgtgctgtgcacacacagacatgagctgaagatctgctctttgcgtaccaccagcttcagctccaatgtacccactttattctcgtgaatggatgtctattaccgaggatttattaaaaacagggtatttgtaaagagggccagcttcgtgctttaaatgaataaagacaggattttgttgtgttcattattggaggaagtacttgcaatggattgtaataacttccctgccaaaggtagctgttttttggcaagaagtaaggaaaacaaaccaaaggaaaggaggattgaggggcaagaggcatgaagttttgcccttcttgaatatgccccgagttgttctacagatcactgaagggcatttgaaggtgtgaggggaaggcttcctctcctttggagggagtcagtctctctgggccaggaaagagacatggaggcagaggggtgcgggaaaaccttgtgtgaagaaatactggctacaaataaagtttagattttcaatactggcacaagcatttttttaaacctatcccaaattcaatttactaaaatccacgtggaattaacctcctgacgagtgaaccccactcactgacaacagtatttctgccatttgtgtgtttctggtaagaaggatggaatttatttaattgaactgtggtttcggtaaagcacactgtagatttcctggcatcagcttccctagctaggattacattggcctgggtttcttttcaaaagaaactctacctgccccatgtaatgctggatgatatgaatttagaatcttgctagaatgtgcctgaggaactcagttgaaaggactgtgcatccagacaggctatataataagaaacatttgaatcccttcttttaatgggcaagatttatgcacaaagtggtatttggttttcaccttgaccttgctgtctgaaccatagccttactcactgaagaaatgtcctatggttgagatatttctagccaaacgtttgtatctcaaccttaaatttttttttcgttttttttttttttttttttttaacagaacaaggaagaatcacactgtcttctttttcaaggccataaaatgagaaccacacatttagccccagtccaacttgggaattctaaacacttggaacaattatactcagtttagtctagtcctttctttggagttgaaaccagttgaaactcctgctgcactctaaagagctcttgtccaggagatgcagcctgtgattcttgttggaacacacatctgtttctggctggccaaatccaaaagtggaatcccaattgcagttttcatgggtggcagaatttcaacttcattataatgtaaccacctgggttgccttcacttttctttttcttcttaaggatgaaataggcagataagtattcattcagctattaaattacatttccatcctgtaacgtcttatttcctttttctctggtgaaatatattgacttgatggattatctgcagtgtcatttcttatatagacctcacaattttaactttcagagtttcttccagtcatttgcggatgtggttttagctttgtaagattttattttaccccaaacaacaaacagcaaaacaaaaattactagatggttttgatttaacaacaatctcttggatgaaaagtaagcaagatatttaaatgaatggaaagaaattgacttcttaaaaaattgaattggagcctgaaacttgtgaaacataaaaaataaaatgcttctctggcaaacaagttgtaatatgattagcttgaaccgggaagctgaaagtattattctggccaccagggggagcacatattgttccaggagatgaagacaagcatgaagataaataatacaatgtaaaagatttgtcgttttgttaaagtggcgactttcctgttgtgaaggtctacttagaagagaagggctcttgctgttgttgttgttattattattattgttagccagatgctcgcacatgtggtaaaaaatggactttctaggctcatcaacacatgacttagcaaacaagttagcttagacatcaatagcaccttgaaaataagtttcacttccaactttgactctaatatatacatagattgaagtctttgagtttaaaataaacatatgtgaattttaaaagcaactagccaggcacagtggctcacacctgtaatcccagcactttgggaggttgaggaggaaggattgcttgagcccaggagtttgagaccatcctgggtgacctagcgagaccccatcgctatcaaaaaaaaaaaaaaaaaaaaaaaaaaaattagctggatgtggtgtgcatgcccatagttccagctacttgggaggttgaggcaagaggattccttgagcccaggagagggaggctgcagtgagctgtgattgcaccactgcactccagcctgggtgacagagtacgactctgtctcaaaaacaaaaaacaaaaaacaaaaaaccaacctaatctaaactgatatttttgggaaataaaatcaatttcatttatatttgtgaaattttaatttttttggttcatttgagtttgtctctcattttaagcaacttatctatatttagtgatctttttgaaagttttaatcatttaaagtgacaatacaatatttctctgtaaggaccaacgtattacagaggcaacaaacagcaaggaaaatgattatcttctcactctctatttattttaggataaaatccagaaagattaccatgggtgaggcaacgataatttatttcttagatttaaaaaaaggagcctctcttaccatctgtaatgtggtcgtttgcacatatttaactcagaataccagctgtggaacatctttatgcaggaagcagtttaggaaaggataggggatgtgtagctaaaagttggcagagctatctggttcaaagtctcagttttaccacttaccagttgtgttgctttgggtaaatttaggcaaaacctttcagccttagtttcctcatccgtttaatggaaattatacctctctccctgggctgctgtgagaactaaatgtaataatatacataaagagtagggacttgctttgggtcacagtcagcttttattagtgttattattgttgctgttttcttctttttctttgtacatcaacgttttatggtgaattaaatcgtgttttaaccttgtagaccacattggctattacatatatatatataatatatatgtaatatatatatgtaatgtatattatatatgtaatgtatataatatatgtaatgtatataatatatatgtaatacatatatattatatatgtatataatacatatatatgtatatatatgtatgtatatatatatgtatatatgtatatatatatgtatataatacatatatatacatatatattatatatgtaatacatatataatatatatgtaatgtatatatatgtaatgtatataatatatatgtaatacatatataatatatatgtaatgtatattatatatgtaatgtatataatatgtatgtaatacatatattatatatgtaatgtatattatatatgtattacatatatgtattacatatataacatatatgtattacatatatgtattacatatataacatatatgtattacatatatgtaatacacatataatatatatgttatatatatatatatatataaaattttttaaaaaattgtttcttgagatagggtctcactctgtcacccaggctggagtataatggtttgatcatagttcactgcagccttgaacttctagactcaggtgatcctcccacctcaacctcctgagtagctacaactacagccatgcaccaccacacctggctaattttttaatttttaattttttgtagagatgcagtcttgctatgttgcccaggctggttttgaactcctgggctcaagccatcctcccaccttgacctcagcctcccaaagtgttaggattacaggcatgagccaccgcacctggccttggctatatattagattcattgatgatccagagcccatcaagactgctaacgcaagtctctgaatttactggagcactcgacagcatcagagggaagagccaccatcacctactaatcatatctgatggccctgggacattcaccaagaccttaagactacttgatgatttcatggctagacctgtgaggattaacagccagcaggttactgccattactgcattgaagcagagtttgtgtagcaagtccacttagatcaattttatgtgatcatgctttgtgtcatgtctacagatccagaactggtgtgcagagacctcgtcctgcttggaaaacgcattcacctccagggggctgaaaagcctgttgcatctgctgctgactttagtgcaatgattatgggcagccatgttgggcttcagtttgtgtctctttgatgagtaaatgactttcgttaaggcaaagctacgtattctagctgctactggagacaacacaagatagcacaaaagcctttaactcatcatcttcaggaagagttacatttcaaatcttccctctttgaaagatcctatcagatttttatggccattgagagaggaaacgtcctgtccttctcagatgtcatttgaaattcaaaatgtaggtaagagcttcatatattgctgaactttaactagaggaaatcctcaaattctcaaagccttccaaggcacacacaccaaattagtgacaaaagatgacttaaaaggtagcagtagaatttactgttacagtaacattcacaagcattcatcaggccttcttacttaacagtgcgtcttagttttagagtgtccacgagtttgttccagatgtctacagccctattagtcatctgtgaagggtgcatgctaattcaatatggcagctgggttctgattccaaatttttggagtttgttctcacaacccggatgcttgcaaaagtaaacaaagacattaaaagatttatgaagagactctgtcacacattttgaagtgcaaagtgtaaatgaatttttacaagcatatggatttcatttctctgataatatgcatgaatttaaaaattaaaagaaaatgtgctggctacaatatgttttacgttcttgttgaaactttgaaaataatcaaaggtgcctaacatattcaaaaccgcacagactcctctatcctatgatgtcatttgaaccatcagatagtgattaatattaccccaaaaggatgcttttctgaaagaagctccagagaggcacttgcaatttgaatttctatttttaagcacattccacagcttatggccagtctcatttcttcctgtataaacttccaggttgctatgctcagcacactatcactctcttaaatttggataacaccatagtcaagtctaacagttgaggcttcatgataatatttacattgaggcataagaggactgagagaggaaaaaagtgcagggaaagcatgttcagctcctcgtggtcacatggaatggattctgtcgagaacgtaaaataacatttgtatctgagtggtgcttggaatcaattaagatctaccagttcagtcaagaatgcagccaacattttatttttaattgtcttgataacatagccttagagaattattcaggttacactaggctcagcatcagaaggaattttggctgcaagaatttcattttgtttagttaaataaaaacaaattagcatagattttttttttcttgcaatttccatttttagctgtgatgttacaatcggtaatggtggtaagtattggtccggtaaaacgtttattttgagagtttaatataaatgaaaataataaatggtctagttcacttccatctgtttttatccatgtagagcttttaaacttgtgattcccttggataaaaataaatttctcataccctcacatgtgtaaagtattcaaaagaagtattatggcttacaaaagagagaatagtaggagaaaaaagttaaaggcttgaaagagccatattttttatgaaactctcttgtataggtataaatgtggagtcccttgttttccccaaacttttctggaaagaaagatgtgacattgacggcatccagtgcgaaggctacagttttaaaagtcagagtacaggaaagccagctgcacaaatggaggctgtcatcttctgatattaaatttgcttttatgaagtatgtaggctttctctacctccaatgataaaggctaatatttattacactcttactaggtaccatgtatgtttcaaaatatgaacactttctaattcagtccttgcagacttcaggggaagtactgtttctatccctgcatcccagatgaagaaattgaggtaacataacctgactgaggttacccacctaataatggcagggccaaaacttgaacttacacagtttggcctcagagccctgcttaatccctgcaaaaccaggagatacttgtaagtccttcagtggctcttctctccctgcccacaagtgaagagtctacccttgagatcttacttgtttctgatgtctgtataatgtcacaattggagagtctctacatttgcaatagcctccaatgcaatgcagagttatttgtatatgacatttgcaacattactgtatatatatcagccatctattgctgtgtaacaaaccataccaacatgtggtagcttaaagcaacaacaatttattatttatcatgattctgtgtgttggctgggtggttccttagcgggtttcccctgggctcactcatgcagcttccttcagctggaggttggctgggctggaaggcccaaagtgacctcacttacgtggctggccgtggctgctgactgttgactggggctctcagctctgctctgcatggcttcttttcatccaggaagctagaccaactttcttacctagcagtcccagggcagcagtctaagagggtgacagtggaagccgcaaggtctcttaagagccagccttgaaagttggataatatcacttctacagcattctaatggtcaaagcaaatcaccaggccaacccagattcaagagatgataaagtagactctacctctttatggaagaacagcaaagtcacattacaaaggggcatgcatacctggatgggagaaacttatggccaagttaggcgatctaccagagtagacaccactaaaaagataaataattgatattaaaagggtttttcaatttctaaaatattataaaatatagtttttgcaacatcatatttacaatgttatttttaatggttggaagtcacttctgcatcttatttcagggttctcattaaaagcactggctatcactgtgctaaacaaacattaggtatgaaattgggggatcctctgaattcttatcaaatgagatatgagtgagaaaaacaaataaatgtcttttgaaaacttcagtccagttgtctgcatcctgaagggactgtgggaagtatgaaaaggtaaatatgtttgatattttattttgatgtttatatgcagaaagtaaactggaaaactgaagaagttatatatatacatggaacatatttaaaatatatatatttttttcctgattttggcttaaatcatgcagatggttcaattcttgtttttagctttgttttgggtctgtaggcagccacaaaagcagataagtaacacagtgttatgaacaggtcattttgattctactgtttttggtaggatcaaaggcagaaggttaatctaatgcaaatgcttgtaactgtcggcttttaaactctgttgggtgagggcaaggtttaagtaagcacctgaaatgctggccacttacatggaacctgaacacttgggattttgagatgcaattgcccaatccttaatgttctatgcaaaaaaaaaaaattttttttaactgaagcttggcattcagtttagaactaggaaaacaacctgctgtttatacagaggagaaaaaaattccttgcctttatatgaaaacagagtagctccacctccttcagccctgaaatgcaggcatacaagttcagtggcattcaggagctttggctcttttacaagtacgaggatcatcttaagaatgcatgacatgcaatacgaccaggtgagcctccctactgccttcctgtcttggtccattttctgttgcttacagtagaatacttgaaactgggtaatttatgaagaaaaacatttatttcttacagttcatggaggctgagaagtccaagattgaggggttgcatctgttatgtgccttcctgctggtggtgactctgtggagtccgaggtggtgcaggccatcacgtggcaaagggctgtctgtgctggctcttgtctctcttcctcttatagagcctttagtcctaatctcctgataactcattaatcaataacccattaattcattaactcattaatcttttaatccatgaatggcttaatccattcatgaaggcagaaccctcatgactgaatcacctcttaaaggtctgacctctcaatattgccacattgagaattaagtttcaacatgagttttagagggggcaaatattcaaaccatagcactttccaaatccagattttcacttgtgtttgtagaaggtgggaccagtcatcatgatgtcagaacaacacggaggccaagagtgaggctctgaattcagacccgaatctgagcccttgttctgctgctgactgtcagtgttaattggggaagttacttgctctccttcaagcctcaagttctgcatctgtaaaatcggtgagccatccatgggtgaaccatcggtaaaatgggtgactccttgacccatgagattgccatgaaggtttccctgtaaacactcttagcccaggatcttggccagagatcactattggcagttattatctaattatggaattacactttggggtcttcaaagataatagatctcagattttaacttcaaatattgcccccaaattgtttgcagaactttcagcctaatgacatcctcacattttcccccgtcctaatagatccacctaattcagttaaaaagaattcaatcacatctttttaagaactaatcaagtgaaaaactcatgaaatatatttttgactgacttgactaatctaattggtaaaaggaattgatctagaaggtttgctctttgtgttctgagcagggtagtttcatgggtgtgagacccctgtgcaacctcgtacttagtttaatgctttgttgttaccctcttgacattcttaatactttttgagcaaggggccccacattttcttttcacactgggccctgcaaattatgttgctggtcctggtcccaggaaatacagtttacaaggcaataaaggccaagatagtcctggagaagactgcaccaggacacctggttggcttgtgaaaatgaatgagttcagagtctgcaagagggagggcacagacctttctaaatgtcatagtcgttgatttttatcttctcccttgataaattaagagtttttttaaacattgacaaaacaaataatagtttttccaatttatagacaacttcataatgttcactgaaatagttatagacatcttttccctctggtgaatattcatataatcatggagggactgagaattttgtatatatgatattagaaactctaagtcacaaaggaaaagactgagacatttggcctaatacaaacaaaaacttcagcttatttcaaaacattataaatagcattagacaataaagaatacatctaggaatagaattgtaatgtatagcaaagctttaacaattcatctaagaagctcttaccaatcagtaggagaaagtggttgagtgaaaataatatgatttatataacagtcacaaactgcaagtgaaaatgcccagtaagcaagagaaacaaatgtccacttcagtagtgatcaaagaaaggcaaaataaaatcagctaccattttttttttttttttttgagacggagtctcgctctgtcgcccaggctggagtgcagtggtgcaatctcgactcactgcaagctctgcctcccgggttcacgccattctcctgcctcagcctccgcaggagctgggactacaggctcctgccaccacacccagctaattatttttgtatttttaatagagacggggtgtcaccgtgttagccaggatggtctcaatctcctgacctcgtgatccgcccacctcggcctcccaaagtgctacgattacaggcgtgagccactgcgcctggccccattttttttttaaactgaatatacaaagatctgttaaaatgttgaggggccaggggagcctggtggtccgcagagggaggaaaatcggtgctgctgttcctgggatcccatctgatatatcagtgcaaggctggggtccccagtgagctgactcagatggagatgagcctgagggatgcctgttggtgagaggtgaggccagctgaacttcctggatggagtggtgacttggggaacttttctgtcttacaagaggattgtaaaatgcaccaatcaggaactttctccctccacaagaggattgtaaaacacaccaatcagcactctgtaaagtgcaccaatcagcaggatactaaaagtagccaatcgcggggaggatttaaaaaagggcactctggtaggacagaaatggaaaatgagaggggacagtaagggaataaaagctagccaccccagccagcagcagcaacccgtgcgggtcctctttcaggctgtgcaaggtttgtcctttcactcttcacaataaaccttgctacggctcactatttgggtccgtgacccaaatctttaagagctgtaaccctcacccctaaggtctgcagcttcattcttgaaattagcgagaccatgaacccaccggcaggagcaaactctggacacattgggagctgttcctgggatctgcacctggagggcaaggggcaagaacgaagcaggagtgggcggcagaaaactgtctgccaggctgtacggacggggcagctctgaagatgagtggccctccagagccgtcccaacttccggcgagagagtcggaactttaaatcccggaagtaggccaggttgagcatggtttgggggtgactctgcagctaaggccacccctcagggttggctgctgtggcctgggcgctgtggcactctcagcagctgcttgatgggtcttgcgttccagcacattccacaccatcagaggcggagcacggaggacctaggatgtgaggactggggtgctggggaggagcggggaggaggtggatggatatgattcccttagctttttgagggccagtatgggattccacggatgcagctgacagcacgtctgggcccagaagtggggcacgcggacgcttccacgggtgtgctgggacatagccgcttcctctccacgctgcgccccggggccaaccacaggccggctcgctgctgccagttgtagatttccttgtgaattgcctgcaatttcactaggcctatccacaaatatcagtttacagtatgcttacattttaataaaaactatttacatagcaaaggtctggaagtatatacagtacatcaaagtattgaaaatgctgtccaagcggtcgttcaggagttaaaaaaaattttaaatctatctgtgtttcgaaaatttttcaataaagatgtttaatgtgacagtatattttaaatttctaccaaaagtggtgtaacagtaataaaaaatgccaaatagaatcattcaaatttattaaaatatgtgactataaaattagaaataaagaaggtttagaaaaataaataaatgaaaaactgtggaagtgtaagcatagtagaaaagaacagtaaaggaataatgtagggaggatgtaaagacagtgaggtaagaaaaaagaaggtatggcaagaagaaggtagaaaactaactttattcatacaatttttcttctgtgagtcaagaagttagaaggtgaaagtatattgagaaaagattaaaaatgcaaagaaaaaaagatctgaaattttcatacatcagtggtaataacatttaaatcaataccggaatttgaattttaaaagagaactcatttttttttttaaggaaagaatctttgaattattgtcagaaaaattgaggaacaatattttagttttccgctatttaaacatttttactattagcagggacctacgatgacagcattttattagtacaggagcagagaaacaatggtttggaaaatataattgaaactggaaaataaattgaccagcctaattttatgaagaagacaaaggaaaggaaaataccaccataggaataaaatgtggctgtgtttaacttataagtgagagctaaataatgagtacacaaggttataaagacagaattaagagactctgaggactgcagaagctgggaggatgagaaggggttggaaaattacctgctgggtactgtgtccgctatttgggtgatgggctcattagaagctcaaaccccagcattacacaatataccgatgtaataaatctgcatgtgtaccccctcaatctatgtatgaaaaaaattcccagaaatctaagccattgattttcaaatgttttaagttgggaacccctgttttgctttgttttctagaggggatctttgcgcaggagcccagtgtatacagcaggtaaggtagtaatgatggctgttctgcctgggggtgggatccagccgcctctaccctgacagttacgcactttcccttcccctctcctccctgcatcccccgttcccagctcaaagtacaggtttttaatatttatgtaataatggataatacaggtttaatatttgtgtaataacggatcagagcagccttgagacctcatacttagcgttacacttgaacagatcctttcacccacatatctaactaagcaagtattacgtttaaactttctcctgaggcccagaaagatgcccttcacatcctggagagtcatttatagtattttggaaaacaagtctaaaacacaaatttgtgttctcattaggaagatttaagttccccgaggagaagaccaaattcatttattgaaatgtgcgtgtaggagttgaattgttgaattgtcgaaagatgtgttgaagcctcaatccccattacctgggaatgtgatcttatttggagacaggatcttcgcagatgcaactaaattaacatgaagtcattaatgtgggccctaatccagtataactggtgtccttataagaagaggaaaatgccatgtggagacagacatactgggaggatacagtgtcacaacagggcagaggttggagttgatgcagctacaagccgcagaatgccaaggactgacagctaccctcagatgcaaggaagaggcaaggaaaggttctgtccagagtctcagagggagcctggccctcctcacaccttggttttgggcttttgttgttgttgttatgaatggcaaccctaggaaactaaggcagtatgccttagtttttaatgccaaataattcctatttttaataattttaagaataaagggaaaacatttattctcaacatcttaggtaaaggcaagcccctcaaagacagtttctatgtctgatttatttttccactcatgtagtttacagaactgtgcctggcatatgttggacactcaatgattgctggctgaacaaataaggagataaccacgtggaagatttgagtcaaatcctgattgagggaggttagaacctgaacctacacaatgctgaaataatcatctttggaggggaaatgtctgtcatcttaattttggggattgtgtgacagtcatataatgttttcagaggtaaaacatgggagaacggagtcacatgaaattttatactctgactttggttttaaatataaatccaggcagcaccaggacattttaattagggttcacgctcttgaaattttacttttaaccagaatttgagccaaagctgtgggaacagttgaggaacccaagatgaaggtctttgagcaaattacccactcacccctattttaaagggccactctgtcaattaatttgattcctagatggtataagtttaggcacattttgcctttggtttcaacttactatatcaataattcctagttacataaatatgcaagaatgagcaaatggttatcctcaattttatcaggtactgtgggtgctagatgtgttcaggcacacacacacatacagacacacacgcacacacacttttttttcaattgcagagttttaaaagtattacttttctgtaactttttttttaattttgaaataattctagacttacagaaaagttgcaaaaatgatacaaggactcttcatcaagatcccccaaatttatatttatgtctaaatccttcagtgaaaatttccaaaagacaaggacatttcctataaaccacagcacaattattaaaatcagaaattaacattcatatgatgctattatccaactgatagactttctatcaattatccaactgatagactttctatcaattgttatcaactgatagacttttcaatcaattgtttccttcgtctgggccagaagccagtctaggatcacacattgcatttaatttgtgtctgtttagcctcctttcatctggaacagttccttaaccattgttttcataaccttgagacttttgagtacaggttagttattttgtagaatatccctcgatttaggttttctttttttttttttttaaatgatgagatgcaggtttgagatttccggcaagaaagttgcaaaaatgatgctgtgagcatttcaatttcttctatcttgaggcccacggtgccctattgtttcatgactggtacacattgtcatgggctgagtcatgtcccctaaaattcagatgttgaagccctaacctctagtttctcagaatgtggtaggatttggggacaagttctttaaaaaggtgattaagttaaaacgaagtcattagggcgagccctaatccaacatgattggtgttttcatatgaagaggaaatctgctgggtgcggtggctcgtgcctgtaacccctgcactttgggaggccgaggtaggtggatcatttgaggtcaggagtttgagaccagcctgaccaacatggtgaaacccctgtctctactaaaaatacaaaaattacctgggtgtgggggcacacctctatagtttcagctacttgggaggccaaggcatgagaattgcttgaacctgggaggcagagaaggcagtgagctgagattgcaccactgcgctccagcatggatgacagagtgaaactgtctcaaaaaaaaaaaaaaaaaaagataaaatttggacagacatgtacaaatggaggatgctatgaagactcagggagagagtggctgtctgcaagccaagaagagaggcctggaagaacagtcccttccctcatggcccccagaaggaaacagccctcctgatgcctcgatcttgaacttccagcctccacaggtatgggaaaatatatttctgtgatttaagccacccagtctgtggtactatggtagcccttgcaaactaacacatatgttaatgttgataagttgatcacttggttagatggtgtcctcaattctctttattgtaaaattactatttttttctttgcgagtgataagtgtgttgtggggagagagtgagactccagatctcctgttctccatcatgccttcaggccacacagttcagtatccactgatgattctgtctttttcccctctgtggggcttcgctttacttttatttatttatttttatttcaataggtttttggaaaacaggtggtgtttgattacatgaataagttctttagtggtgatttctgagattttggtgcacccatcatccaagtagtgtacactatacccaatgtatagtcttttatccctcatcccactcccaccctttcctccgagtccccaaagtccatcatatcgttcttatgcctttgaatcttcacggcttatctcctacttgtaagtgagaacatatgatgtttggttttccattcctgagttacttcacttagaataatggtctccaattccatccaggttgctgcaaatgccattatttcattcctttttatggttgagtagtattccatgttatatatataacattttctttattcactcgttgattgatgggcctttgggctcgttccatatttttgcagttgcaaattgtgctgctataaacatgcatgtgcaaatatctttttcatataataactcattttcctctgggtagatacccaggagtgggatcgctggatcaaatggtagatctacttttagttctttaaggaatctccacactgttttccatagtggttgtactagtttacattcctaccaacagtgtaaaagtgttcccttttcaccacatccatgccatcgtctattattttttgatttgcaggagtaacgtgttatctcaccgtggttttgatttgcatttccctgataattagtgatgttgagcattttttcatatgtttgtcggccatttgtatatcttcttttgagaattgtctattcatgtccttagcctgctctttgacgggattgtttgtttttttcttgctgatttgtttctttgtagattctggatatttgtcctttgtcagatgtatagattgcaaagattttctcccactctgtgggttgtatgtttactctgctgattatttcttttgctgtgcaaaagctttttagcttaattaagtcccatctattaatctttgtgttgcatttgcttttgggttcttgggcatgaagtctttgcctaagccaatgtctagaaggggttttccaatgttatcttctagattttttttatggtttcaggtctcagatatgtctttgatccatcttgagttgatttttatataaggtgagagatgaagattcagtttcattcttctacatgtggcttgccaattatcccagcaccatttgttgaatagggtgtcctttccccactttatgtttttgtttgctttgtttaagatcaattgactgtaagtatttgggcttatttcttggttctctattctgttccactggtcgatatgcctgtttttataccagtaccatgccattttggtgactatggccttatagcgtagtttgaaaacaggtaatgtaatgcttcctgatttgttctttttgcttagtcttgttttggctatgcaggctcttttttggttccatatgaattttaggattgttttttctctattctgtgaagaatgatggtggtataatattttgatgggaattacactgaatttatagattgcttttggcagtatggtcattttcacaatattgattttacccatccatgagaatgggatgtgtttccatttgtttgtgtcattgatgatttctttcagtagtgttttgtagttttccttgtaggggtctttcacctcattggttaagtatattcctaagtattttattttatttgcagctattttaaaatgggttgagttctggatttgattctcagctttgttgctgttgttgtatagcagggctactgatttgtgtacattaagtttgtatcctgaaactttgctgagtttatttactagttccaggagctttttggatgagtcttcagggttttctaggtatgcaatcatgccatcagcaaacagtgactgtttggcgccctctttactgatttggatgccctttatttctttctcttgtctgattgctctggctaggacttccagtactatgctgagtagaagtggtgaaagtgggtatctttgtcttgttccagttgttagtgggaatgctttcaaattttcccgtttagtataatgttggctgtgggtttgtcatagatggcttttattaccttaaggtatgtcccttctatgccaagtttgctgagtgttttaatcgtaaagggatgctggagtttatcaaatgatttttctgtgtctattgacatgatccagtgattttttgttttaaattctgtttatgtgatgtatcacattaattgacttgcagatgttaaaccatccctgcatcgcctagtatgatacccacttgatcgtggtggattatctttttgacatgctgttggatttggttagctaatattttgttgaggattttgcatctatgttcatcagggatattgttctgtagttttcatttttgttacgtcctttcctggttttggtattagggtgatgctggtttcacagaaggatttagaaatgattccctctttctctatcttttggaatagtgtcaataggattagtatcaattctttgaatgtctgctagaattcagctgttaatccatctagcttggactttgttttgttggtaacttttaaattaccctttcagtctcactgcttgttattggtctgttcagagtttctgtttcttcctggtttaacttaggtaggttgtatatttctgggaatttatccatctcctttaggttttctagtttatgtgtgtaaaggcgttcatagtagccttggatgatcttttgtatttctgtggtgtcggttgtaatatctcccatttcatttctaattgagcttatttggctcttctctcttcttttcttggtgaatctcactaaaggtctatcaattttatttatcttttcaaagaatcagctttatgtttcacttatctcttgtatttttttggttttgatttcatttagttctgctctgatctttgttattccttttcttcttctgagtctgggtttggtttgttctagtttctctagctgcttgaggagtgaccttagattatctatttgtgctctttcagactttttaatgtaggcatttaattctgtgaactttcctcttagcacaactttgctgtatcccagaggatttgataggtcatgtcactattatcattcagttcaaagagcttttaaatttccatcttgatttcattgttgacccaaagatcattcaggagcaggttatttaatttccatgtatttgcatggttttgagtgttccttttggagttgatttccaattttattccaagtctgagagagtacttgctattatttcaattttcttaaacttgttgagacttgttttttggcctatcatatggtctatcttggagaatgttccatgtgccgatgaatagaacgtatattctgcagttgttgggtagaatgttctgtaaatacatgttaagaccatttgttctagggtatagtttaagtccattgtttctttgttgactttttgtcttgatgacctgtctagtgctatcagtggagtactgaagtcccccactattaatgtgttgctgtctatctcatttcttaggtctagtagtaactgttttataaatgtggaagcttcagttttaggtgcatatatatttaggattgtgacattttcctcttggactagtccttttatcattatataatgttcctctttgtctcttttaactgctgttgctttaaagtttgttttatctgatataagaatagctactcctgctcacttttggtgtccatttgcatggaatatctttttccattcctttaccttaagtttatgtgagtccttatgtgtcagataagcctcttgaagacagcagatacttggttggtgaattcttacccattctgccattctgtgtcttttaagtggagcatttagtccatttacattcatcattagttttgagatgtgaggtgttattctattcatcatgctatctgttgcctgcctgaaaaccttcgtttattttttaatttttaattttttttaaattgtgtcattgttttacaggtcctatggaatttacgctttaggacattctattttggtgtattttgaggatttgtttcaagatttagaggtcctttaagcagttcttgtagtgctcgcttggtagtggcaaattttctcagcatttgtttgtctgaaaaagactatatctttccttcatttatgcagcttagtttcactggatacaaagttcttggcagataatttttttaaggagggtaaagataggaccctaatctcatctagcttgtagggtttctgctgagaaaatctgctgttaatctgataggttttcctttataggttacctgatgcttttgcctcacagctcttatttttttcctttgtcttgactttagataacctgatgactatgtgcctaggtgatgatttattttttatgatgaatttctgaggtgttctttgagctttttgtgtttggatgtttagacctctaacaaggccagggaagttttcctcaattatttcctcagatatttttccaaactttttgatttctcttttgccttgaaacaccaattattcttaggtttggttgtttaacataatcccagtttcttggaggctttgttcatttttttattcttttttttttgtcaccgttgggtttattcgaaagccttgtctttgagctctgaaattctttcttctacttgtttgattctgttgctgagactttacagtgcattttgcaattctctaagtgtgtccttcctttccagaagttgtgattgatttttatttatgctatcactgaagattttcccattcatatcctgtataattttttttttgatttgtttaagttggacttcacctttctcttgtgccttcttgattggcttaatagtaaacctcctgaattctttttctggcagttcagagatttcatcttgttttggatccattgctggtgagctaatgtgattttttgggggatgttaaagaaccttgttttttcatattaccagaattgtttttttgtttccctctcatttgggtagactacgtcagagagaagatctgggactcaagagctgctattcggattcttctgtaccacagggtgctcccttgatgtagtgctctcccccttcccctagagatgtggcttcctgagagctggactgcagtgattgttatttctcttctggatctagccacccagcagagctaccaggctctgggcttgtaatggggagtgtctgcaaagagtcctgtgatacgatctgtcttcagttctctcagctgtggataccagcacctgctctggtggaggcagcggggagtgaagtggactcagtgagggttcttggttgtatttttgtttagtgcgctggttttgtgctggttggcctccagccaggaggtggcccttgcaagagtgcatcagctgcagaaatatagggaggatcaggtggtggatggtagagctcccaagataatatgtcctttgtctttggctaccagggtgggtgaggaggaccatcaggtggggcaaagttaggtgtgtctgagctcagcctctccttgggcagggcttactgcagctgctgagggggatggaggtgtggaggccaatggagttatgtttccaggaggattatggctgtctctgctgtgtcatacaggtttccagggaagtgggagaaagccagcagccacaggcttcccccagctcccatgcagcccaaaaagctagtctctctcccagcatgccccgctccccccgccacaccccaacagcactgagtttatttccaggcagccaatgagcagggctgagaacttgccccaggctataagcctcccagctgggaaagcaagtcgactcacagttcctcagctgtctcacagagcctgcaggggcaattcacctccttcaaagggcctgtggattctctcagctttcctggtatgttcctgtggtagttcctggagcaaaatttcacaatgtggtctctgcatgctgctctgtctgagtggggctgcaagttacacctgcctccaatcagctatttcccccaactgatgattcttgcttgaaagaatgattattgtggtggcagccaaatatatttttaaagtaaactattttatcaaagtaaagcatatacagaaaagtgtacaaattaaaggttcatatcttgatgaattttcagatggtgaacacatccttttggcctctgacttgctcaagaagagaataatatctgcacccagaaacttccttttgttcctctcagtctccatatcccactttccctcaatgctaactgctctcatgatttcttatcccaaatgaatattaatttttcccaatttgtcctaatttccatttatattgtggaataattcattatggattaattttgtgtatgttttctttcagttagcattccttttatgactgtatactattccattgtgtagaatataccactatttatctattccaatggggatatatatttgggtagtttccagattggggctggtatgcataaagctactgtgaatattttaaaagtatttttgttggcatgtttttgtttctcttcaatatctaggagtgagatttctgggtcatagagtgtgtatatgcttctagaaactacgaaacacttttccaaaattgttggcttcaacatactcttcccaccagcaatgggttactccagttactccagatcctcacccacactaagaaagttttgcgtttttcattatgtctattctagtgggtgtacagtgataccacattttggtgtaaattgtatttttggatgactaattatgcaaatgctttttattgacttgctggacatttgtatactttcttttgtaaatcttttgcatatatgtatgccaaaaatcttttgggagatagagatagagagagagaaagagaaagagacaggtcttgctctgttgctgaggctggagtgcagtggcatgatcacaactcacaactcactgcaacctggacctcctgggctcaagcaatcctccagtctcagcctctcaagtagctgggactacaggtgtgtgccaccatgcctgactaacttttgtactttttgtagatacagagtttcaccatgttgccaggctggtctcaaactcctgggctcaagtgatctgcctgccttggcctcccaaactactgggattacagacatgaaccaccctgcatggcccttttgcttatattttaattgggttgtttgccatctgcttattgggttataagactatatttcctgtattggtttcctaggaatatctcttttaatttaatttttaagtggttgctctatgactaacaatatgcatccttcaattatcaaagcttacttaaagtcaaccttgtaccatctctcagtttgtacttcacacctggtctgaaatgtttcacttcctactttacaaatgtcataaccttacaagagtaaactcccctgaacctgttcccctgacatgaacttcaatatactttgtaaacctcaccttacagtgttatatttttctctgtatagtcagttgtgttttaagacaattatgagaagaaaagaaactccatgttattttatgttttcctactcacttatcatttctcatgcttttccttctttcctgtagatagacattcctatctagaatcaattgcctttggcctgcggaacattctttactatttcttatagtacagatctgctggtgatgattttttttcagtttttattttctgtgaaaatgtctttgccctcattttttgaggttctcagtgttctctttttattgttttgcagcagaatgcccacatagaacataattgcaaatatttggcagtgcaaatgaggagccagtgcttaagtacaaatgggacacatgtttcttttgttttacataaatatttacacacaactcaggccctacaaacaactagactctaggtctgagcagcagagaaaatgcccctgggcctgcttccccccagcgatcagttcatggaattgatcatggttattgatagtgatgctgatggtcgaacgtgatcacaacgcacccattttctagagccttcccccaccctccacagacatatctggccaggacagacaattggagtttcttgaaggtcaatggtctgcagctgttgagcactcaccatgattctgttgtttcctgtttctgtggaggagacaaacgcacttcatgactctcttcagctcctcttacaggaccagcaccaaagcccctgacacctccaaggacattggacctcgcccttgaagaagcctttgcccttttcatctttaaagatcttcctccaacaatctagggtccctgtatacatgatgtgggctcctttgagctccatgtgggaggataggagatcatgttggccatggccctcatagtctttgcagtaactcagcttgccaggatgtgcatgttcttggggctggggagcatgccctcagctgtatcctactagcagaaggaggctgctgggtagatgatgatgtcttgcatgagatgctgaagccctggtacaggccctgggtccattggatttggtgatcctcaccggccaggctcccaggtctttgaactcatgcactgtgcccaatttcccaatgtctgctgccaggaggttctgggaaatccagggggtacatgaagcagagtgaggtggtgccagccaggccacccaaggccgggtggccagcgaagcacctccagaactgcatgcgcttgtctgcacccccaggaagaactgcttgtacttatccttgaaggcaaagttaagggcttgcatgggaagtaatggatggcactggcaaggttgcccttccaggaagacagccccatgctccttggagatgcagaggacgcagtccatccaccacacttcgtgctgcttgtgggctgcaatctgctactggcatgttgcccctgcagcagcagcagcttgacctgctggatctgagccacggccatttgggaatcattggtgagggagttggactgttccatcatggtggcaggcaggacaatggagtgtggagagctagggagcagagggaggtgctggtggctcagccctgccaccttggaccaaaggctaccctcaatgttgaagggtattgtcaccggatattaatctctgggttgacaatctctctctgcctttcagctggcactacaaatgtagtgttctattgtcctttagtttctattgtttaggacatgaagtcagctgttgtatttgtatattattttcatactgctatgaagaaatgcctgagactgggtaatttataaagtaaaaagtttaatggactcacagttccacatggccggggaggcaaaggagacaaaggcacatcttatatggcagcaggcaagagagcatatgtagggcaactgccctttataaaaccatcagatctcatgagacttactcactatcacgagaacagcaagggaaaagctgacccccatgattccattacctcccactgggggggtttacgggattatgggagctacaattcaagatgagatttgggtggggacatagcctaaccatatcagctgtcatttgtaattatttttttcttttatgtaatgcatcttttctctccactttctgtttttgagatttttctttttacttttagcagctttactctgatatatctagatgtgctttctttgtattgtttggggtttgctgaatgtctggaatctcaaattgatgttttccattgtatttagttatattttggaaattatttcttcaaatatatatatatttggcatcattctcactcttttctcctgttgggctccagttacacatatgttacattgtttgatatcatcccataggtctctgaaaccatcttttttctttctaccctgtagattggataatttaagtatctttagaaaaaagaagtctgggtccaggcacaatggctcatgcctgtaatcccagcactttgggaggccgaggtgggcggatcatgaggtcaggagatcgagaccatcctggctaacacagtgaaaccccgtctctactaaaaataccaaaaaattagctgggcgtggtggcgggcgcctgtagtcccagctacttgggaggctgaggcaagagaatggtgtgaacccgggaggcggagcttgcagtaagccaagattacgccactgcactccagcctgggcgacagagcgagactctgtctcaaaaaaaaaaaagaaagaaaaaagatgtctggatactattgggatactattgatatgtgatcatgtaaattttccatctttttctttaagattgttttgaccacattggccctttgcatttacatataaattcacaactttctacatagaaaaagtctgtcagggtgttgatttggattgcttcagatctagagagtaaattggagataattgatataaatacaaatttgagtcttctaattcctgaagatggtgtacccctctatttatagttagatgtcacttaaagatggggatacattctgagaactgtgtcaggtgattttgtcattgtgtgaacatcaccaagcgtacttacacaaagttagatgcctagcctactacacaccgaggctatgtggtatagcctattgctctgaggctacaaatctgtacaacatgttactttgctgaatactgtaggcaactgtaacataatggtgtttgtgagtgtaagcatatctaacatagaaaaggtacagtaaaaatatgatataaaagataaaaagtgatgtactttgtattagcttgttcttgcattgctatgaagaaatatctgaagctgggagaatagaggtttaattggctcatggttctgtaggctttacaggatgcatggtgctggcatctgcttctggtgacacctaggatgattaccctcatggtagaaggcaatggagagccaacatgtaacacggtgaaagcaggaacaagagagagccaagggggaggtgccaactttaaacaaccacatgctcatgtgaactcagagcaagactcactggttattttgaggacagcaccgagagaatggtgtcaagccattcatgagggatcgacaccccaatcgaatcacctcccaccaggctccacctccaacattgggaatcatatttcaacatgagatttggtggggggcaaatatccaaaccatatcacacctgtatagggcacctaccatgaatggagactgcaggaatggaagtggatctgggtgagtcagtgagtaagtggtgagtgaatgtaaaggcctaggacattactgtacactactgtagactttacaaacactttgtacactttatacagagtgtatcattttataaactgtacacttagggaacactacatttataaaagtatttttttctttctttaataataaattaaccttggattactatgacatttttactttttaaaacttcaaatttttaaaaaagtcttgacttctgtaataatatttagcttaaaacatgaacacactgtataactgtataattattttctttctgtatatccttattctataagcttttttctactttgtttatactttaagttctaggttacatgtgcacaaagtgcaggtttgttacataggtatacttgtgccatgttggtttgctgcacccatcaactcatcatttacattaggtatttttcctaatgctatccctcccccctccccccaccccacaacaggccccagtgtgtgatgttccccacccccatgtccaagtgttctcattgttcaattaccacctatgagtgagaacgtgtggtgtttggttttctgtctttgtgatagtttgctgagaatcatggtttccagcttcatccatgtccctgaaaaggacatgaactcattcttttttattccatggtgtatatgtgccacattttctttatccagtctgtcactgatggacatttgggttggttccaagtctttgctattgtgaatagtgccacaataaacatacgtgtgcatgtgtagttatagtagcatgatttatattcctttgggtatatacccagtaatgggatggctgggtcaaatggtatttctagttctagatccctgaggaattgccacactgtcttccacaatggttgaactaattgacactcccaccaacagtgtaaaagcattcctatttctccacatcctctccagcatctgttttttcctgactttttaatgatcgccattctaactggtgtgagatggtatctcattgtggttttgatttgcctttctcagatgagcagtgatgatgagcattttttcatgtgtctgttggctgcataaatgccttcttttgagaagtgtctgttcatatcctttgcccacttttcgatgggattgtctttttcttgtaaatttgtttaagttctttatagattctgggatattagccctttgtcagatggatagattgcaaaaattttctcccattctgtaggttgcctgttcactctgatggtagtttcttttgctgtgcagaaactctttagtttaattagatcccatttgtctattttgacttttgttgccattacttttggtgttttagtcgtgaagtccttgcccatgcctatgtcctgaaaggtattgcctaggttttcttctagagtttttacggttttaggtctaacatttaagtctgtaatccatcttgaattaatttttgtataaggggtaagtaaggaaggaagccagtttcagttttctacatatggctagccagttttcccagcaccatttattaaatagggaatcctttccccatttcttgtttttgtcaggtttgtcaaatatcagatggttgtagatgtgtggtattatttctgagggctctgttctgttccattgatctatatctctgttttggtaccagtaccatgctgttttggttactgtagccttgtagtatagtttgaagtcaggtagtgtgattcctccagatttgttcttttggcttaggattgacttggcaatgcgggctcttttttggttccatatgaactttaaagtagttttttccaattctgtgaagaaagtcattggtagtttgatggggatggcattgaatctgtaaattaccttgggcagtatggccattttcacgatattgattcttcctacccatgagcatggaatattcttccatttgtttgtatcctcttttatttccttgagcagtggtttgtagttctccttgaagaggtccttcacatcccttgtaagttggattcctaggtattttattctctttgaagcaattgtgaatgggagttcactcatgatttggctctctgtttgtctgttgttggtatataagaatgcttgtgatttttgtacattgattttgtatcctgagactttgctgaagttgcttatcagcttaaggagattttgggctgagacaatggggttttctagatatacaatcatgtcgtctgcaaacagggacaatttgacttcctcttttcctaattgaataccctttatttccttctcctgcctaattgccctggccagaacttccaacactatgttgaataggagtggtgagagagggcatccctgtcttgtgccagttttcaaagggaatgcttccagtttttgctgattcagtatgatattggctgtgggtttatcataaatagctcttatgattttgaggtatgttccatcaatactagtttattgagagtttttagcatgaagggctgttgagttttgtcggaggccttttctgcatgtgttgagataatcatgtggtttttgttgttggttctgcttatgtgatggattacatttattgatttgcgtatgttgaaccagccttgcatcccagggatgaaactgacttgattgtcgtggataagctttttgatgtactgctggatttggtttgccagtattttattgaggattttcacatcaatgttcaaaaggaatattggtctaaaattctgtttttttgttgtgtctctgccaggctttggtatcaggatgatgctggcctcataaaatgagttagggaggattccttctttttctattgattggaataatttcagaaggaatggtaccagctccttttgtacctctggtggaatttggctgtgaatctgtttggtcctggactttttttggttggtaggctattaattattgcctcagtttcagaacctgttactggtctattcagagattcaacttcttcctggtttagtcttgggagggtgtatgtgtctaggaatttatccgtttcttctagattttctagtttacttgcgtagaagtgtttacagtattctttgatgttagtttgcatttctgtgggatcggtggtgacatcccctttatcattttttattgcatctatttgattcttctctcttttattctttattagtcttgctagtggtctatcaactttgttttcaatcttttcaaaaaatcagttcctggattcactgattttttgaagaatttttttgtgtctctatctccttcagttctgctctgatcttagttatttcttgccttctgctagcctttgaatttgtttgctcttgcttttctggttcttttaattgtgatgttagggtgtggattttagatctttcctgctttctcttgtaggcatttactgctataaatttccctctacacactgctttaaatgtgttccagagattctggtacattgtgtctttgttctcattggtttcaaagaacatctttatttctgccttcattttgctatttacccagtagtcattcaggagcaggttgttcagtttccatgtagttgtgcagttttgagtgaatttcttgaccctgagttctaatttgattgcactgttgtcagagagacagtgtgttgtgacttctgttcttttacatttgctgaggagtgctttacttccaactatgtggtcaattttgtaataagtgtgatgtggtgctgagaagaatgtacattctgttgatttggggtggagagttctgtagatgtcttttacgtccgcttggtgcagagctgagtttaaatcctggatatccttgttaaccttctgtctcattgatctgcctaactttgacagtggggtgttaaagtctccctttattattgtgtgggagtctaagtctctttgtaggtctctaaggacttgctttatgaatcaggttgctcctgtattgggtgcatgtatatttaggatagttagctcttcttgttgaattgatccctttaccattatgtaatggccttctttgtctcttttgatctttgttggtttaaagtctgttttatcagaaactaggatcgcaacccctgcctttttttttttgcatttgcttggtagatcttcctccatcctgttattttgagcctatgtgtgtttctgcacgtgagatgagtctcctgaatacagcacactgatgtgtcttgactctttatccaatttgccagtctgtcttttaattggggcattttagcccatttacatttaaggttaatattgttatttgtgaatttgatactgtcattatgatgttagctggttattttgcctgttaattgatgcagtttcttcctagcctcgatagtctttactatttggcatgtttttgcagtggctggtaccggttgttcctttccgtgtttagtgcttccttcaggagctcttgtaaggcaggcctggtggtgacaaaatctctcagcatttgcttgtctgtaaaggattttatttctccttcatttatgaagcttagtttggctggatatgaaattctgggttgacaattctttcctttaagaattttgaatattggccctccctttcttctagctcattgggtttctgctgagagatccactgttattctgatgggcttccccttgtgggtaacctgacctttctctctggctgcccttaacattttttccttcacctcaaccttggtgaatctgacaattatgtgtcttggggttgctcttctcgaagagtatctttgtggtgttctctgtatttcctgaatttgaatgttggcctgtcttgctatgttggggaagttctcccgaataatatcttgaaaatcatttttcaactttgttccattctccccatcactttcaggtacaccaatcaaatgtagatttggtcttttcacatggtcccatatttcttggaggctttttcatttctttttactcttttttctctaaacttgtcttctcacttcatttcattaatttgatcttcaatcactgataccctttcttccacttgattaaattggctattgaagcttctgcatgtgtcatgaagttcttgtgccatggttttcagctccatcaggtcatttaatatcttctctacactctttattctagttaaccatttgtctaaccttttttctaggtgtttagcttccttgagattggtttcaacatgctcctttagctcagagaagtttgttattactgaccttctgaagcctacttctgtcaactcatcaaagtcattctctgtccagctttgttccattgctggcgaagagctgcaatcctttggaggagaagaggcactctggtttttagaattttcagcttttctgctctggtttctccccatctttgtggttttatttacctttggtctttgatgttggtaacccacagatgaggttttggcgtagatgtccttttcattgatgttgatgctattcctttttgtttgttagttttccttctaacagtcaggtccctcagctgcaggtctgttggagtttgctagaggtccactccagaccctgtttgcctgggtgtcaccagcagaggctgcagaagatcaactattgcagaacagcaaatattgctgcctctggaagctttgtcccagagaggcacccgtttgtatgaggtgtgtattagtgtcttccacctccacatctcgtcccaagagaagatcttttggggcaataacacacatggagctgtcatctcctatgataacaatgctttcttctggaatacctggtgaaggacctgcctgagcctgttttacattaaaatgttttttatgagtagaaagagtgcactctaaggtaataaaacagtatagtatagtaaagatgtaaacaaatagcatagttatttatgatcattatcaagtattatgtattatacataattgcttgtgctatacttttatatgactgacaacacagtaggcttgttttcacaagtatgagtaatgttacagtgactaagacatcactagaagatagagattctcagcttcattataataatcttatgagaccaccgttgtaagttgtatatacagtctgttgttgtccaaaacattgttatgtgtttcattactctatttaggttttctttaatttctctcaataatgttctctagttttatgtgtagagatcttgcactttttttaggtttatttctagaaattggatgctattattagcatctgtagaatcagtaggatctgtttaaaatttcatttcctagatgtttactgcagtgtatcgacttctgttgccccagctaaaattcacttactgatttaaataatttataagtagattattgtgtattttaaatacatgcttttatgtattctgtaattaatcactttatctttttccttttcaacctgtattttttacatttccttttctgctttataatgttctagactaatatttaacagtggacatcttgtgtcaatcctcattgcaggtaaaaactttaaatagctcaccattatgtatcatatttgttttagattttcacatatcatttttattatattaggaaagtttccttatatttttaatttgttaacaatttttgttttctattatgagggtattgaattttttcaaaagcttttctgcatttcttatatagtcatatgatataactttctttttattctaacaatgtggtaaattatgttgtcatctttgaattttaatcacctttgcatttctgaaataaactcaagctggtcatgatatattattctcttatgtataacaacttggttttctaatcttttgttaaaaattttacatctgtatttacaagtgacattagtctgccaatttccttttttgtaatgactttttcagattttggcatcaagattatgctggcctaataaaatgattcaaaaactttttctgtttttctgtatataggtcatagaaaattttcagctctattataataatcttatgagaccaccattgtatatacagtctgttgttgaccaaaacattgttatgtggtgcattactgtattcaggttttctttaatttctcttaataatgttctctagttttatgtgtagagatcttgcacattttttcatttattatcatgataataataataaatgactatgttattgattaatgtcttttctatactatattatagtatctactatctactatactatactgtttattattttagtgtactcttttctgttataaaaaaattaatgtaagtcagccttaggcaggtccttcaggtccttcactatattgcccaggtttttggtacatggttttaaattagttgtttatcatgttctctcattatgtagagatgttctctctttcattcctgatattagtagtttgtgttctcctcccttcatttctagaatccacttctgactttctagatttttctctattgtatgttagttttgtttcaccaatttctgttatcctttttattattctcatgtttgtcatttctttgggtctaatttgctgttgttttcctagttctttggttgctcattaattctacctttattattttctaaaatattcacagatgaccatacattttcctctgcgtatggttttatctgtatcccaaaggttttcatgtcacatttttattactattcagtttcatataatttataatttctattgtgatttctcctttagcccatagggaatttagggtgtattacttactttgcaaacactgggattttattagttatcttttttctattaatttctagtttaattctgctgtgaccaaaaacatgacatctctgatgtcaaacttctgatattcattaagattgctttattaccccttacttacatttacttttatctttatgtttacttttcttattttttacatgggtttgaaaacaatgtctattctgctatattctacatatgtcaaacaattcaagcttattcattgccttatttaaatcttctatattcttcctgattttttcttctgtttgctctatttaacaaaaccctgataggcctagatgtggttttctttgtatgtttttcttttcgggttcatagcacttcctaaatgtaagacattctgtcttccattgcttttggaaagttttgggtcattatttctttaaatattgcatctgtcacattctctctctcctctactttgagattccagttatactatgtattatgctttttcatgtgtcctgtatttcttttatgttcttttctgtattttccatctgtttttcttctgtgcctcagtttgtttaatttctgctgatctttcttcccccaagtctagtctgcttttggacccatctagtttagcttttatttccagtttctttatttttcagcacggaacctggatttaattcttttctaaaattggatttatatgctgaaattttttgtcttctattttctagaacatgtttatcacagctgttttaaagttcttttctgacaactctgttaactggattacatttacatttacattacattctataagactgttctttaaacttctatattgtcattttgtcttatctcctggtatgcctggtattttttattaaataccagatattatatataatatattttagtgataattggaggttctggacagtcgtatcttcctgtagatagggtttacttgtgcttcaggcaggctgtgatggaaggagagatcatcagtctagccccaggaggtgagccagtgtttgtcatggcttgtttaattctagtttgccttactcctagggttcatccctgtgacagtcccaacccaaagcctgtggtgttttccagagcttctcttctttgtcaggctctgagttctaatttttgttcctcccacccagctttgtgagactgcttaaagctatgcctagtatatctcagacttttggagctgtcacttccttctctgttctcctccccttcagtttctaggtccctaggctgctgctttggaatccgtcagtctctcaaggagaaaggctggacttttttcttctgtcttggatcatggctcttcagattcaagcagccttcacagtactctgatatctccaaacaggtatttttcatgatttgttttccaagttttctagttgttctggatagagggtttggtttattctaagctagcccaccatagctggattcacacatacaacttttagaaggctgggcacagtggctcacacctgtaatcctagcactttgggaggccgaggtgggaggatcacttgaggccagtagttcaagaccagcctgggcaacatggtgaaacccacatctctacaaggaaataaaaataaagaaattagcctgctataggggcaaatgcctgtggtcccagctactaagtaggctgaggtaggagggctgcttgagcccaggagttggaggctgcagtgagctttgattgtgccactgcattccagcctgggtgacagagcaagactctgtctctacccccaccccctgtttttaaagaataaattctcgtcttgtagattataaatctgagactaagaatgatttactcaaggtgacatgcctattaagtgcagaaccagaatttgaaccaggtcttttgaaattaagtcctatttaagactccccagctccatgtatcaaccacatctaaggattggcacctcagtgaaggcaacagtgaaagtgtttggacatgtcaaaaagggagggaagggctctcagccttagcgccatttttttggaaacctctgcgccatgagagccaagtggaggaagaagcgaatgcgcaggctgaagcgcaaaagaagaaagatgaggcagaggtccaagtaaaccgctagcttgttgcaccgtggaggccacaggagcagaaacatggaatgccagacgctggggatgctggtacaagttgtgggactgcatgctactgtctagagcttgtctcaatggatctagaacttcatcgccctctgatcgccgatcacctctgagacccaccttgctcataaacaaaatgcccatgttggtcctctgccctggacctgtgacactctggactatttctgtgtttatttgtggccgagtgtaacaaccatataataaatcacctcttctgctcttttagctgaaaaaaaaaaaaaaaaaaagaaaagggagggaaggagtgagctgagtggtggctgttttgccaacaggggtcagcttagcttgtttgttcatctagctggtgttcttatcctgagcttggttgtagccacacttccaatggagacagtcacattcatcacccatacacaaacacaacctacgacttgcagccacacatatgactgtgtctgcgacagatccaaagaagtatatacagtaggaaagctgttcaggcagtattggtcccagtagtcagttgactcagaaaactgggcaaggatttttattgcttttgggacatataggcagtgatacaaatggtaccttaggccggaaagacaattggctaggcctaaaagggattaggcatgtaagtgctttattcataacataaatagtgcaagccacaaaactactgttaccatgttccctcctccagggaccaagccaacagaaatcaccagtgtgggatgaagtttgacctgaattggagccacatggagaatgctgcctcagggttgggtgtggatggggaggcactgagtacgatgagggagaagccaatttgatactttgtggaagaggaaaaatcataagattactgcttggtggctccagaggactgggatgacatggtcttgattgtttctctcatttctccctgcaaagtcatggtagctgggtaactgtgattgtcaaaatggaggctgggattaaattcttgccccaattcctttgccctccaccctcaagaatgaagaatattagttatgtttacaaatgaaaaagttttttcactgacccccctcttctgacaaatgcatgtgaaatgggcagacttgcagttgacttttgagtaacacggaggttagggggtaccagtaccacccccaacatcatctgccgccaaaatctgcttataacttttgacttccccaaaacttaactactaataggctactgttgaccagaagccttcttgataacataaacaatttacccatatgtctatgttatatgtattatatactgtattcttacaataaaataagctagagaaaagaatattactaagaaaatcataaggaagataaaatatatttactcttcattaagtggaagtggatcatcataaaggccttcatccttgttgttttcacgttgaataggctgaggaggaggaggaaggggaggagttggtcttgcttctcaggggtggcacaagtagaaaatccatgtataagtggacccacagagttcagacccagattattcaagggtcagttgtatttcccttctcatgttctctctccgcttttcagggggaagcaacattggaatggggacttttagtgtctcttcttcttcctcttcccccaaggaaggagctaatataattggtaaggacctactgtttttaaggtctgtgctgcccaagggtgggcttatggggcttcaaacacaaaccccagggcccagtttctcctcttttgtgctgtctctctcatgagtgagtaaaacatccctggatcccctggctcccgtgccacaggcaacccagggcaagtctttctcctcctttcactcttctgaagccctctgcagggagatccagtgaatctacatggaactggacagggagccaaagaggtgtaggtttccctctttcagagtcaggcttagagagccccactgcagcctcaaatctagtatctacatctttccatctaaatactgccaaatctcctattaaagctgtcactttgacccccacagggttatgtgccattctctggggagaatcaccttgaacctaatcctacaggaagaagaacatctgtctctgtttcttcagacatttttgctcccagcggctggatgtgcattcactggcactttgacaaaagcaggacatgctgtaaatatttctcagtgtgctgatgcatttattgaacttgtaatatataaaagggtgaatcaccatgttgcaatcataaaaaattcaatttttaagcatgtcttcttggtctcctagattcctaaaacataagtctcaagtgctttaggtaaatggatataacagaacaccattacaaccatgagcagcaataagcaaaagaaagggaacaaagaacccacagcggaagcagaattgagcaaccaagcaaacaggcatgaacagaagaaccatatataatgttgacttgtgttcaaacagccccctgatcttctcggagaaaggtgctacctgaaatagaaataagatagatatttttcacacattcctcataccctttttccggtcttggttacaaaatgtatagggcttcaggttactcctcaaccaaaattatattacaggagacctcaaaacagttgctcttgggggctcgggtgctgacctgctggtatgtcataagattaccttgtttttccatcagttctgatgcctgagctctgggcaagtgagatctctgggtttttggaagaagaacttgaggaaggtaaagtccatctttgtcaatcctggtcctcattcagggtggtgacttggaacatcactcatcttatcccagggcacatgtctgcactcatagtgatggaaattacttactgtcagaaaaccggactgcaatcctctaacttgaattgcaggtggttctgtgaattctacactggtgaggctaagagatttggaacgctgtccacattgtcacttgctgcctgttctcctgagtacgctcagcatttgagtccccagtaactgtcagggaggcttagtaggtaacaagcattctgttctattttctgaatgaaagtatgaacacttttcctagaaaatgtacccatgtggagtgggaaaggtgtatgtggaaaaggcgaggaattgacagcctaaggaggaaaaggggcggtggactgaagaactgcttctttttaggggttggcttcatctgaggagatgaccagcttgccgttgtgcctgcaggcctgacacatgcacatacatgcctgttaggtaatcaaccctgccaagtcctcaacatcaccaagcaaggagagaatgtgttccttagtccctcaagaaatgactcctagaatagcttggagagatgcagcaaccaaaaatctggcagaagtattcagtaacagcctctatggtttggtctttgattccccagcgaaacccaaggaaactcttgggggcagcttgtccttcctgaagaccccttttggggccaccctccaagtgggacccgctgaccctcccttcctgctgctcactctctttggtagtcccttcccacactgattagagctgatccatgttagcaacaggacactgtggacatgacagtgtgtgacttctgagatgaggtcataaaagacactgtggctcccactgtgcttcagaaggacaacttgcttgggggagggggaagccagctgccatgttgtgaggaggctcaagcacctcatgtggaggttcatgtgtttagggactgaggcctcctgaaaacagccatgctgagcctgtttccttctcggtaaagtgtgaatgataataagatacacctcatataattttatgagaatcagatgacataatccctgtcaagtgctccatgcattcttcaaataaataacttttactggttgtatgatgttccatgatatggacatattacggtttaattagttccttttaggtggacatgtaggttgtttccaaatcttactatttttataaatcactttgcaatacatattattgaatgtgtggatttgtctaggtcttagattatttctttagggtgtgttgttttctaaattgcatcagagcctgtaagaatgaaggttatgaagtctaatatatgagcaggtcctcctacttctactcatctttatctcaccagggtaccactatcaaaagctaaaaattgggcacacaagagaccatgcttttatgcatggttatggaggacccccaggggacatcatctgtacgaaatgggactgataagtggatgattttgccacaaaatagaaaatggacagtaacaggcatatgtctcttgggtagcctctgaacccctgagagaggaagacctgtggatatttctgtgagcttctgaccacactacaaatgtaaacatttgtacttcttcgaatatgttcttggttaactcagtgttcataatcaatatttatttcagcttttctgcaaatgcttatctttcctagtaatcagatctcctaagacctccgggctttttggcctctcaggggaatggatctgattccacactaggctggatatgcaggatttaaccagttgtattaacctagcttattgaacattttctccatccttgctcatgttggacagttcttttataataaattaagtggtgtttttttcagggttgtctagtttattcacttagtttgtctgtgtactcttgcacctttgcacattgagttttcttacttctttagtatattttgatatgtaattataggccactttcctctacctcacttttttctttcaaagttctagttgttattaaatttactcttcctgatgagaaaataggagactagaagataggtttgaagaaactgtagatcatgtaagattctacacaggttaagcatatagttaattcatttcttttctttcattcaaaattaatgcttttctttcttgcttctcctcctccttctttcctctctgttttcattctgtattcctctgttatccacttatattctgaaacttttacttcccatttttgatttgctggtttcctgttggatcttttctatgatcaccatttcttgttttagagttatttacagtctcttaaattttcattttagggctttttaaaattaaaggttagcatagatacaggaaagtgcacatagtacaatagtcttaagtacagcttgctgaatttttatgaaggtatagatccatgtaactaccattgggatcaagaatctaataaggctttctcatgccccttcccagtctacacctcatctctacccagaatgaaccactgttttgacttttatcagtatatattggtttgcttgttcttcaccttcatgtaaatggactcatactgtgagcactcgcctgtgtctggcttcttttgcttatcattatgtctgtgagatccactcatgttttatgggtactagtagtttgtccttttttattgtggggtagtattatattataaaaataaaccataatttgggccaggtgtggtggcttatgcctgtaattccagcacgttgggaggccgaggcaggaagatcacaaggtcaggagattgagaccatcctggccaacacggtgaaaccccatctctgctaaaatacaaaaaaaaaaaaaaaaaaaaaaaaaaaaaattagccggtcatggtggtgtgtgcctgtagtcccagctactcaggaggctgagtcaggggaattgcttgagctccggaggcggaggttgcagtgagccaagatcgcgccactgcactccagcctggtgacagtgagactctatctcaaaactaacaaacaaaaaaacaaaacagccccccatcccataatttattcattctcttcttgataagacaatcatattcttatacagcattttagtaagcttcactagtaacaatatcccataattaaaataggaatctttgtattgtgttaaaaaaaactctatttagattcttccattaatttccagctctaactcactcagcaaaataataagacaaccaccaaattggaaccctttgcagttcattatcacagaattgactgaagtatgtatcttctcacttatgatataagtatctttttctttattttattgtaacattgagatactgaagcttaaatatgctttcctcaaagttccactggtaatcaggaaagaattgtggtcagaaaagacagagaagacagtcaaaactggtttgaatgccttgaacatttattcatttgttacatttcaggtaacattcttctccccttgtatagagagtttcaggtgatatgaaatagttgaaatgaagaggtctatgtaaattttaagacaataagtaattcatgatcatttcccatgatcacttgagacagaaagggggctgaaggactgacagctggcaaaacaggttccccaaaggcaggaccggacagactctgccctgttttctttggaagccatttgtcactgtcaaaaacacatagtggcctctcttttagctctattcaaacaagaatataatttgtatcctgacgtttccctgaaaatagcaagtttcatttgtcacccgggtggttttcaagcttcatatccactgttgtaaaggtgagttgagctttttaagagtggctttgttcagcaatgttatttcctcatgaaaacctataacttgacttttcaagcttatatcctttcacatcctcttgctgtctccatgaaacttgacaattatttatttttgtattatatgcttattaagctcaacttcattctttaaataatcatattagtattcatgtttatgattgtgggtcactgattcttcagctattacttttcattcatatctcttcttataaaagaaggtaataatttaaatatatgagtcaaaaatgatattaagactgtcttttagaacaatctaaagctcagctttgaatggaaattacagtttagccatgatagaactgtagtttcattgtaactgggaataaaatgaattgcttttcacgtgaggtaggaaaatatggaagaattaagagactttcatattagaagaatgctaagaaagtgactactatattattacatgtatgtatctcatccagcccctttttccttaaaataattcctaaaactatgaaagagaaagacttgtgaagttgtattactttttttcctcttataaaggaagagcgcctagattgtagaaatagtagaaaataaacacactttaaaacagagaaaaaattcatgttaaaatacagcaactcctatattgaaagcctggaattctggagcttgatgatacctaggagatgttttagttcagcagttggcaaaccatggcccctgtgccaaatccagcctgctgcttgttttggtgaataagatttgattggaacccagccacatgcatgtgtttatagtttgtctatggcggctttcatactacatgacatagttgagtagctgtgacagagaccaaatggcctgcaaagcctaaaatatttgctatctggccctttacagaaaacattttctgatgcttgatccagttgccagtaaagagttgattatgcaggagagtgctcttgaacataccgtgatatgcctgggccttccgcacaaagcttacagtctaattgggaaagttaagtcatgggcattagtacaatttggaggaagaaaatgactagtgccctggaaaatacaaagggtttcaggatttcagtggagccttggggaaggcaccatggaaaagtttaggctcagtttgatgaatggatagggttcaactatgcccaaatgtctgtagaatattcctgttcaaaggaacattgataagaaaggctgaaatatgggaaagcactgtgcatgcatgaggaccaccaagcagatcaactgggcatgtgcaagagtgggctaggggatccatccagaatgacggggctgggggatctaaatgtaggctgagaatgatgtcttttatgtcataggcttagagggggttggaggaaaacatggtcattatagtggcttaaaatatatccacaaaccctttgataccctcttcaaaagatgggactggattcctctcccttaggtgtagactggattggatttggtgagctgcttctaaagaacaaagtcatgtgaggatgatggtgggtgattttcaagactaagtgatgaaaagcactgtggcttccttcttgctctctcttgggtcacttgctctggaggacgccaggtgccctgtcttgtggatacaatgatagccctatggagaggcccatggattgaaaacctgagtctttctgctaacagtcatcaaggaatggaggtcttctgacaacagccatgtgaggcagccctcctggaggcagatcctccagcccaggttgcgctgtcagatggctgtggctgtggctgagagcttggctgcagcctcatgacatatcttggtccagaacaacccaattaagccactcctggattcttgaccctcagaaactttgtaagacgtttgttgttttaagccactaagttgggggaaatttgttacatagcaatagataatgaatagaattattgcctttatggtgtcactttgggcaaaataagcctagtaattttcattaattcattaattcattcactgactgcattcaatggcatgtgctctgtgcagtgccctgagggagccttggtcttcaggcttcatggaatgttgcagcacatgggataggccttgctaatgagtgactaccgtgggcattcagtcccattgtagtccaggagaaggggaattgtggcactcacttgttgctcttcccatagagttcccgacacaccaataacctcctacctctctacccatgggatttcggactgtttccagtactccccatcattgtagagtttatttctaaaaagcccacccacgctatagatgaaagctcaaacacagaggctgagaagtccagggacctacagctcataaatgacagggtcaggacctcaacctggtcagttgattcctggccaaagttgtcgttggcccttttttgagaagctaaatataactttgcttacaagttcaaaggaaagtgattcaaaacttgctccgtcaaatgtcttgattttaggattcacaggtagaaataaaatgagtgaaaaagcactgaattcatgtgagaatgggttccaaaaaatatagcagatttattcactcattcatttatttattaaatatgatgatcaggccattacgctagtgatccagataagaaatgattctgatctctcccaagctcaaaacgagagacttcttatgtgagaaatggtaaaatagaggtatcaacacagtgctacctctagtcaggaaatagtgcaaagaacacacacacacaatacacacacatacacactactttttctacctcaacaaacttaggctgtggattacccactgcatgttttatggtctctaaaatatgggacattctcttgtatttttcctgtaatagccaggaagagaattttttttattacattttttaatttccataagttattggggaacagatggtgtttggttacatgagaaagttctttggtggtgatttgtgagattttggtgcacccgtcacctgagcattatacactgcacccagtttgtagtcttttatcccttacccacttcccaccatttccccctgagtcctcaaagtccattgtgttattcttatgcctttgcatcctcatagcttagctcccacatatgagtgagagcatacgatgtttggttttccattcctgagttacttcacttagattaatagtctccaatctcatccagcttgctgcaaatgccattaattcatcaggaagagaatttctttgtggttaattcagcttgacttttaaagcttttaaggaaaagataatatgtggttatatgtaaggtgtaaagttcatgtcattaaaaggtgcttgtctatatggcatgatctgaggccccattggtttaaatatctcatttcttacttgtcaaagtgcatgaatgtccagcattagaaatgcagttccttggggtctggagggcattgagggctcccagccctgcttcttaagtgcatctgctgctgcatagtatcaggcttaagtcttagcatccacaccttgtcagcaattaggtgacagctaactgtgctcaaggctttctggggactgaatgaagaactggggtggcacaggtagtgaaggagggtgagaggctggtggggccatgacagggggtgttgggggttggcagagcccaaacttccctgctttccctggaactggctgcaccaagaagttgaggctcctggtttgtttggaatcaggtatggtacaatccattgtcccgtggaccagtgttgtcatagaggcccaggtctcctaagaccaagtagaggtgtactgtttttgttggtgtgtgcactagttacctgttcaaatgatcattctcttgggcaacaggtaaaaaagttccttgccttaattggttcctcaggtaaagcacaaataagtcactagcttgacagtagaatcagcagcagttttttttttttttttcagtaagacaacagagagctcacagtccccaaaagaaaaagttactttcttgccaacattggtcaaaagtatgattcttttagaaaaattcaatgaagatatttcctctcccaaccccatcaaggcaggaaatggaattgtatttcctaaatgaatgaatgttttcataatatttatggttttggatatatgtgatcattaaaatgtgacttctatttgctatgcaaagtggagacaaattagaattgattgcatatggagattttgtttgttttgtatccttttgtatatgctacgaaatctcaaaaccattagacccggaggaacctggagaggccattggatccatcttatgtctctctacttcaaagtgtggcccttggactagcagcatcagcatcttccaagaccctgttagaaatgcagtggaccccatctcagacctaataaactagaatctgctttactacaaaaaaaaaattccttgccttaagcttccttcctaccacatttagggggttttctattggtcggtgaggtattatttctgtagtattaattttctgtgcattcttgtagaattattttatttatgtgtttatttttaagagataaggtctcattttgctgcccaagctggagtgcaatggcacaatcatagcttactgcagccttgaattctgggctcgagtggtcctcccaccccagtctcccaagtagctgggaccataggtgtgtaccaccatgcctggctcttatagaatgtatagaatgactttagctggagcattagtagatatttttatatcacctttcaaagttatgtatcagctatgaaagtcaccttctatttatggtaatattggttttctacttatggtagtgatgtcgagtttccatttaaaatatatttatttaagtaagaaagcaactagatttaatggcatgttttaattaaatactagctgaacagtcaaggtggtaagcaaataactgatatttgatggaatgggaaaaattaatttcgaaacttgttctggcagaaaaggaacaaaattaactttgaaacagcattttgtccaagctgaactggatgctgtgagatttttgtttttaactctgaacccccttaccttattcaggttttgctttgggaggaggaagttatagggagtgagttatactgaaccctggacagtctagcatatctctgaaagagatataagttttggagttaagccaagctgggtttgaaatctggtttctccactcactgatttgaaatcttgtcttcactcagacctcagtgtcatcatctgtaaaatgggttagcagctctgggaaggtttgtggtaagaaataaacgaggaaacgtttgcaaatactgagcacgcaatcaatactcgataatcggtggctgccagtattacctccttgtttgatgttcacgaggagcctggagttggcggtcattcggctgcacgcctcctggctttgtggacagttatcttggaagaagagttgggggcttgtggctgtttcaggtgtgtgtccaggccgtgctcagctagcatgactgctgcatgttgcacactttttgtgctttttacttttaatgcctgtaagaaagcaactcattttcttcatttgatgtgattaatgggtgtccctcggagaggccgcacccgggagaaagcgctgacgcctccgacccagctccgcgcacagcggcgcccccttctggccctcgtcccgccggagctgcgcttgcgtgaacagccctcaaatgcgtgtttgccctgctgcacctttgtcccagacatttgtaagaagtgtaggattagagtcacactaccacacagagcatttttccgctttcctgtcgtgcctgtagatatacttgctctggatttcctttgtcacagagagcgctagtcatggaggcagaaccacgtaggagatttgctcttggaagggctgaactggctgctgctgactgccttatctactgatcaaggctccctggccacaggaatgtgaccttccgaccactggctgaacagggtcagtgcaatcacgcctcaaatgagcttttgatgagcctaaatggaaggaatctgcacaatacaggtgtgctgtgatattctaggttggcctttgatgcttgagctaaaggacttcattttaaagtcccttggtggagacagtgaaaggctggcagagggataggatctggaaaagatgcttaataggcattgcattttgttagtaatgataataatttacattttaaaaagtattcagatacaatattattaaatctgtttgtttaaaactaagctgatcattaaaaaatcagctttaacccaattagattttttttccaagggagagactaaaactcgaatattatcactgtaagcaatcaagaattttattatgaaaactgtcaaacacatagcaaagatgaaagatttctacaggaaactgttatacccactctttaagtcctgctaccaacatggtactgtccttgccccatcgtatgtgtatccatctatccagagaatgtggggattttattttgattcacaagcctcagaaattaattttgacttcttagagttcttttgcaccattactgtaaaactatccagaataacttaagatcatctgattaaatgtgtactagataataaaaataagaacagtataaatatttccaaagaacaaaatttaaccatcgcacaatttcagcctcatcagaattctggatctcaaatagaatgcagttaactctttgaaaatggaattggaagggtctgtctcttgatctagggtctggttccatgggtgtgttcagtttgtgcaaatttgttaagctgtagattcaataagtagttttataaataaacaataaaaatgaaactgtgcagcagttttatattttgggagcaaaatgtttgtctcctcagtttcccatttgtctagctggccctggaatcctggcatctttcttccttggacaaggcatagccacctctgagcttctgttgtctaacattgggcagggggtgtaaaagcacatgcttgatttggggtctcgtatttctgtttgtccaggtttcactgtaatggtaccaatgatttgaattcctttgcaggtaaattggcctttattctgtaaatggtgctgagaagtcctattagtgaggtgcaaggagaagtgggtttgagatcagggagtcctggtttagcactaggaacacaatacaaccttttttgtctttgtttttgagacaggatctccctctgttgcccaggttgtagtggcataatcacagcaactagaacctctatctcctgggctcaagctattctcccacctcagcctcccaagtccaagtagtcgggactacaagtgtgggccaccacgcccggctgagtattttattttacttttgtagagatggggttcttgctttgttgcccaggctggtcttggaactcctggtctcaagtgatcctccttccttggcctcacaaagtgatgggattacttgtgtgagccactgggcctagccgtgatacaactttttaaaaatttatttatttattatttttattattttatttttttccaacttttattttaagttcatgagtacatgtgcaggatctgcaggcttgttacataagtaaacgtgtgccatggtggtttgccgcacggatcatcctatcacctaggtattaagcccagtggccattagctattcttcctggtgctcttccttcccccacctccactcctttcaaaagtccctagtttgtggttctcccccacgtgccaatgtattctcatcattcagcttccacttgtaagtaagaacatgcggtgtttgactttctcttcctgtgttagtttgctgaggataatggcttccaaatccgtccatgtccctgcaaaggacatgatctcattcctttttatggctgcatagtattttctctatccggtctttcactgatgggcatttaggttgattccatgtccttgctattgtgaatagtgctgcaatgaacatagtgtgcatgtatctttataatagaatgatttatatttctttgggtatatacccagtaatgggattgctgggtcaaatggtatttctgcctctgggtctttgaggaatcaccacactgtcttccacaatggttgaactaattcacactcccaccaacagtgtaaaagcattctattttctccacacctcgccagtatctgttgttttgtgaccttttaataatagtcattttgactggcatgagatggtatctcattatggttttgatttgcatttctctaatgatcagtgatgttgagcttttgttcatatatttgttggctgcatgaatgttttcttttgaaaagtgtttattcatgtccttggcccacttttaaatggggttgtttgtttttttcttgtaaatttgtttaatttccttgtagattctggatattagacctttgtcagatggatagactgcaaaaattttctcccatcccgtatgtcatctgttcactctgatgatagtttcttttgttgtgcagaggctctgtttaattagatcccatttgtcattttgttgcttttgttgcacgatataacttttaaatgtcatctcccctttcccattacctcctgccttcccctgcaggggcctgggccctgggccctgggccctgagtcataaaggtatgcttaggttttgtccaactattctgagagctgtgagggcatggagatgaggtggggaccaggaggcaacgtttggaagtaaaaaagccacatagaggcataaaaaataaaagaggggcactataggaatgtattgattgaattgctagaatatctcttatttagactttggacagatagaaatatcctttgcatactcttcttgctgtggctggtaaaagaaatctatgcaacatgagatttatgaaaacacaaagtgtgacctcaggctctgagttggaaagagaagctggtaagtttcatccttcctgtgcgccttcagagtttgccttggttgctttctctgcctatttcctgacttgaagtccacaatcagctatcacctactttcctgctcctgtttgtaacacatgtccagagatcttcatgggtgctgtctcccttctttgatttattcccttctttgtgttttccagtagggctgtcatccccatcactgcattgtctctcatcaagaccaccggtggcctggtcttggcaaagccaatctccaaatcttacctgacatctcagcagtatttgactttggtgaccactttctcctttttgaaatgccatcacaatgtgcttacctggtttttttctgttgccttcacctctcctccaccccgtttcctgctagatgttggcatgtctcagtccttggccttcacatgtactttttcatatgctgatgatgtcaacagatccataatgttaaacattgtgtatactttatgattcctaattaatttttccagtctgagcttctcccctgaacaccagactcatgcatgaatctcccccttaacatgtcttttaggaaactccagcttaacatagactaagcattttatccatccatggtattcctttcatcccaagccttcttcatttcagtaaccaacattactatctcttcagttgcccagacacattttctattaacctttgtaagcctcagtttctgatctgtctagcggagctatgctaatagtatcagccttagagcctcagttccttcatctgtaaaaggatcattgtaataactgctttgcctactttattgggttgccataggataaaataaaaatgctttgccaattgtaaagtgctgtgcaaatgcaaactactgttatatcattggagaattggaggtaccttatttaaatatttatataataaatttatcttagattctttttgtaaacagactgtgttttttgataaactggcacatttccttctggtagttgacaagggtactgtcacacaatatgtttgtttctttgctttgacttacaggaggctcagagcaaaacgtaatgtttagctgtactcgttcttcttcttttttcttatttttatttttgagataggctctcactcaatcgcccaggccgaagtgcgatagcacagtcatagctcactgcagcctccacttcctgtgcttgggtgatcctcctgccttagcctcccaagtagttgggactacgggcacacaccatcatgcctggctaatctttatattttttgtagagacagggtttcaccatgttgcccaggatggccttgaactcctggactcaagccatctgccttcctaggcctcccaaagtgctgggattacaggtgtgagacaccatgcctggctactcagtattcttaagttagcttttaattatgattatgttttctttctaaaaacatgttttattaattttttctccctattttaatcaaggtggtacattcatctttcattaaaaacatttttaatgaaatgtgtgtgtgaagattctaggtataaacaaataatagatcaataaacgaacaagtagatcccatggccatgacccattctattcagagatacattagcattattttatcatcattgacctgaaatacagttttttagtaggctaaatttagtgggcaatgaaaatgaaataattgttaatttaaatctttcttattttgtgcatatttcttaaaatatatattttttgataaatctagttactgttttatgttatcacagagccagtttacttttttaaaacagtaagccctgtttgtaacgtatggaaatataagctgtaaactgaaataatatattttctataataattatgaattcagctggatggaacagaaaacttaaatgacagcagctattctttcccatacagcaagaaggtgagtggtggatggctgagggccagcgcagggctcctgatgttataaatgtccaggttgcctccctcttcaggctcggcaccctaagttggagacttttgctctcagtatcacaggatgggtttccaggcgttgagactgcattccaggtggggaaaagaggaaagagcaaaggtaaaaattcagctgaatctacactgcttatctggagaaaaatacttccccagaagctccatttggtacatttctgcttatgtctaattggacagaactgagtcacatggccactcttagctgcagggaagtctggaaggctcaatatttttaaccaggcacattgttgtcccaaacgaaattggctttctcttagtaaggaaaggagaagaatgaatattggataggcagttagcatggtttgtcatgttccgcaatttcttttgctttgggagtcaaatttctgaacacagaagatatttctagcaatgttaatagtgtttcaggaacttatcatacttcattttttaaaatgaaaatctcactttgacagtggttttgagaattggatgaggcacataggtgaaggacctgtaagacttccctgacgtagtgactcaaatgatgtcaaacattcatcatcatgacttctgaaaaactgtaccactttccagcttttgtttccacttttcccctttaaaaaatttgtagaagtttaagaggtacaagtacagttttgttccatggctgtactgcatagtggtgaagtctggactgttagtgtaccccccactcaagtagtgtacattgtacctattaagtaatttctcaccactcacacccccaccctcccaccttctgagtctgcagtgtgcattattccactgcctatgtctatgtgtacacattatttagctccgccttgtaagtgagaacatgtggtatttgactttctgtttctgagttatttcatttaagataatggcatccagttccctccataatgctgcaaaaaacacggtttcattctttttacagctgaatagtgtaatatatatatatatgtatataccacataatatataacattttctttatatatctaaaacgtgatatatatttctttaatcagtcatccactgatggacacttaggttgattccatatcattgctattgtgaatagtgctgcaataaacatacgagtgcaggtatcattttgatataattatttctttttctttgtgtagatacccagtagtgggattactgaattgaatggtagttcttttgagaaatatccatactgtttcccatagaggttgcactaacttatgttcccactaacagtgtgtatgcattaccttttctttgcatccttgctgacatttgctatttttgactttttttttttttttttttttttgagctggagtttcactcttgttgcccaggctggagtgcaatggtgcaattttggctcactgcaacctccacatcccaggttcaagtgattttcctgactcagcctcccaagtagctgggtctacaggtgcctgccaccacacccaactaattttttgtatttttagtagagacggggtttaaccatgttggctaggctggtcttgaactcctgacctcaggtgatccacctgcctcagcttcccaaagttctgggattacaggcgtgagccactgcacccgtcctatttttgactttataatgaccattctgactggtgtaagatgatatgtcattgtggttttaatttgcatttccctgatgattggtgatgttgagcattttttcatatgcttcttggccatttgtatattttctttcaaaaaatgtctctgcatgtcttttgctcgctttttaatggggttatttgctttcttttttttttttttgagtgtttgagttccttgtaaattctgcatattagtcccctgtcagatggatagtttgcaaatattttctcccactctgcaagctgtttgttcactctgttgattgtttcttttgctgtgaagcttcttcgtttaattaagtcccatttgtctacttttgttttgttgcatttgtttctgaggtattagtcatgaatcctttgcctagaccaatgtccagaaatgatttccctaggtttctttctagtatttttatagtttcaggtcttacatttaagtctttaattcatcttgagttagtttttgcctatggtgagagacagaggtctggtttcattcttctgcatatgacaatccaattttctcagcaccagtcattgaaaagggtgtcccttcccaagtgtgtgctgttgtcgactttgtcaaagatcagttggctgtagatatgtgaatttatttctgtgttctctattctgttccactgatctatgtgtctatttttataccagtaccatgcgttttggtcactatagccttgcagtataatttgaggtcaggtaatttgatgccttcagctttgttctttttgcataggattgctttggctgtttgggttctttctgggttccatataaatttcatcaccttatttttgtataataagcttcttattccaaaatacattaaataaatataagaattaattttttgatattacagtgtcagggaaagacacactcatcaatttactcaacgccaaggtcactagtcaaagaatatctcatgggacacatttgaactgtgtgccctatttgggtgaacccacaaaattttccttcatgtgtttacaccaagtgaggtgtgaagtggcagcatcttctacacatgttgagtctcttctacatgtgtgccattcacatacatgttaaagcactttcatgttcagcctttattttgccctatgtttttctgcaccacatttattaagtgcaatttgtgtgcaacataaccattaattcccccaaagttgaagaattggtaaagaaaatgtgcagaaaaaagaaaagagggagtaatttttactactttacattttatgtataaacttaattttaattttcatattgttgttcattgcttatgtcaatttatttttgttgttcaagagatacatttttctatctgtaaatgttttaaaacttaggttgaaatgaagtacattctattccctgcccattagtatttatgaaaaaattgaaggttaatgacttttaagttatggacaagttttcatgaataaattaaagtttttcagcaagggatagctgtgtgtgttttaagtctctgggtagatttatatagtaacaaagaatggggaactcaagtttgtgtgttgaggcaaaatatataggatattgttgtatgcattatcttgcttcccagcagctttctgggagcaggcacagtaatccgttattcaggaaagttgtaatggctttctgctctgtcaacttagctttggtggaactacatttcccagagctccctcccctgcgtagctctagtcttttgctgtgtgggtctggaaggcagaagggaagcctcaacacttgtgaacactcactcatccggaggatgtgggcagcgctgtgctggaccctcagttcccccagctcccatccacttcttccttcagcttttccaagtcctgggctgcatgggtgcagctctatggcatatgcacccgttatcttctcagtgttaactgcgtcatcaagttcgatggtggtgagaacagaaatgggctccagtctgtccctgtgggttccttcttcacatctagcttttcttccagctagcccttcctgctgacctcaatgacttcaggcccctgtcagatgcagaagccatggcctttctaggcttttccaccagctcccacattgcttgcccaagatctagtccatgtagtgagtccctaattctatgccacccatgaggttcaaactccctgagtaagccctgactgtttactgatctagaaattatcagactcagagaaatgatatccctcagacttggcagtgcagctccttcgtggacctgggggaggtgaaggacctggccctggctcagcaaggttattgcatttaatcttcacaacaggtattattatcattttataggtaaggcagctctatttttcttagggctagctctacaaataattttttttgtcttagaacaagctgatgtccaaaatttgctttttatggaaaatctgtcgttgtaaaaatatgactctggagacaaattttctgagagcagtaaataccagaagcccagccaaaaaacttcagcaccctgttgagattgggaaaaggcaacattgacttattttcacttaagtttgtgacttagaaaaaaactaacagtgatggttttcttcttctctgttaggcttgtggctgcaaattctttgcatggccgtttatttcactgaagcgaatgatagcccaaaagtccttgagatatgtgagctgcaaaattctacagctgtatgttcattttccagaattcagaaaagtgcagtgctcaatttggtaaacatcacctccatggaaattatgtttgcccaggttgtgtatttgaatattaaacataccccgccatgaatcatgattgctggttgaccagctgcctaaccatttctttgtgttcattcctcctcgtgtctttgactacttcaggctggcattcaaatgccaggtcctgaccatgtttctaaagaatacatttgaatgcaattactaagcctcctttagaagtccagcagccctgtccattataataattgatagtctagaaacttgttagagagaaaggaatttaatcaaaggtagaagtaatttatagggtaagtccgacatatacatactttctctaagccttggcttgattggttttcatttttgggatgtgtatttgacatttgaaacaattttggtcaataatgctttcatgcgaggctgagagttctttgacctatacattgaaaatgagggagagccaagagaaatttggtgctggtggtgactgctgaactttcaggatcattaaaatatactgctaactgcatgaaataagcacatttgactcaagtttctccttggggatggtattggtcagtttctcaggagagaagccctcttcctctcccttaccaaagactctgtctccagttaaacagggagctgcttctttggttattagtggctgccccaccttggtgcatccttggtgtttagcactgatcaccttatgtaccaacatcttcctactagaaccctgagattcttcctgagcttttcctggacttgggagcatgttggcctgggcacatgcaagttgtaaattcttgggagttaatgtagaagcaatggcctgtagccattggtagatgatagataggaactgatgggtaaatacacagccacaccctgccaccatgagggagaaccatcaggtgtattccatgtagttccttatagttccccagtgggattggggcccagttgaccatagaaggaacttcctcctttgcccaaccttttactggattccttcccttcccttacttcctcactcccctagccgtgctttctgggaatatctcccaactagactctgcacatgaatccttgtctcatagtctgcactgggggagcccaaatcaagatgatggtcttcatctttgtacttgctaggtcttcctttgagagctaagcctgaagagtaaagcctcttttgctgatcagatgagtaggttattactggttggcccatttgcagaaggaaccacccaagagcagatgagagaactgagttccaaggcatgtttctgcagagacaaggtagagaggagcagagaattgggcgctgatcagcagcggagtggacgaagggtgaaactttactaacctggagcagaggtctaagcccacaggacactggccaggagagtcttgtttctctgcatacttggcaaggcacttcatcttcttctgtcttctctttaccctccatgtatgagctgatgactctaacatgtctagttctacctctacacaaacacctaagagatgctgacagcactcctcacaataagtgacaattcctgcacctgacacccttggtggacctcaaactcagcatgtcctgaaccaagttcattattttccctccataatcctccttttcaccccaccacaaaacactgaatattttccatcttcagcattacttcctttagctaaaagcaagctctgcacttctaagctatttgctgttcctatcttccacatctgactcctcaccaaaactgctccattctgtcctgtgaatacttcccgaatgaggcttctcctccccatcactggtttcatgttcccatcatccctcatcgcacctgttcagtcatctcatgactccttgcactctcccccttcatttatccctccattttgcaaccagagcagtcttcctgaatggtgaatctgaccatgtcatccctaccaccaaaacctccattacttacaaataaaggtttaaatcattttttctggcattcaaggctgtcctgtcatcgttccattttttcccctcttccctcttttcctatcttgcatgttcctctatctccatgctccatgtgctcgagaccagcacttttccaaagtgtgttccacagaatgcggatactttgagatgctcctctgcagaagggtttcagggtaagaaactggagagcactgctccctttgcctcactcttggatattcaagtggtacattaggacattctagactcttgagaagtcctgaaatgaagaaatctgtttaattttgtttaacttaatgtttcccaacttatgtgaccatggaatctgtttctcccctttacagaatagcagctattattagtcttgtaaaggactagtatttgttggatacatgccactttttctaaccacaccagacttcacatctgaaacatgtcaaaccccaggactagagttgttttttatttatttattattccttaagctctttacttagtcttaaatgattttaccccaatgtgtctcttaaatgcctcacttatcctttggggtctagctcagatgccacactcatcatgcagcctcctccgagaccccccagcatccctgcccggcacttttggtgccactgtgaaaggagtggttttgttctgtcttgtagtgtaatcaacttacatacttattgaactgcaagatctttgaggacagtgtttaattttcttttctaaaaaatgatacctacagtgctgcacaactacattgactgcaagtaatgacggatcaagcttttctttctgaattgattttacctcaggtcattattctctgtgaacaacaagcaacagaggagcatgatttcttctgggttagatcaggttcgaataccagctgggctgcccacaaggtggtgacttcggcaatctatggagcttctctgagcgtcagtttttttacagggctgttgtgagaattaaatgagttaatctatggtggtggtggtggaaggaggcttagcatggtaccagctaagtaccataaatttcaaaaccacagtgataataaagatggtgatggagatgacgcccacagtgataatggatgacaagtacttagcggtctccaggtaccaggccccatactaagtgcactgcaagcacaattttatttaatcatcacagcagccatatgaggtacatgttattattctcattttacagatgatgaacccaaggctggggtctgagctgtgtagtctcactccagagcctgtggtctgcttaaccatcgcacaatactgtagactgacctagtaaaaatatttactagttgttatttttattcacaaatattgcaaaatatgtggaattcaacagaaaaaaggataccagaaactgctggattggaggagactttggtgttgaaatctatatttgtcactgtcactaaattgtgaggtctggagccaaataaggctgacctaaacctcacttcttttatctgtgaagtgggtatccttttttctgttgaattccacatattttgcaatctttgtgaataaaaataacaactagtaaatatttttactaggtcagtctacagtatgtgtgatgtacctcatatggctgccagcttgtggttatgcagattagaagcattgcacataagttgttagttcatcttttcactagagggagggaaagaataaattcaactctgaaattgcatcccactttcctctgaaaaacaagcaagcaagcaagcaaacaaacaaaaaacacaaaactccaaaacctccctctttaaaatctgggactgatgacaaaaggtatctggaaaacacggagcccatgacagtctgggaacaggtgcagctgcagatctttgcttgtgcggatgaggagccgagagggtcgccatcgcccatgaccccgaagcccactgaggctgtgtccttggaggctcgcatccagcctctcctctttaacgctttgctgctgcctagctgcagtctcctttccatctccctctgccgcccgttagaccccagctgctctccctcgggccagccctaggtccccttgtgccacccttaccactgctgcggaagtgatgtgggaatcacagggcggagcgagtgatttatagacaaaccccgtccgtaaactcccagacagaggcagggtacggggctagcacggcgttcaaggctcatcgtgcttcatcccagctcacctactcaactggactttcgctacccacctgcagcccttctgtgtcaatcacctggggcctctcacggctagggtttcaggtttcagtgtccttgttcaccctggaagcctgaaagttcaaaacaacacctgattcgctcttgttctctcattctggaatctattttctctcctttagctctgatttaaatcgattttcagcacgctccatgatgcagagcaagtgtcttctcttccatgaaggcttctcttacggaccaagacaaaaggtattttacctggaaggcccccttccctcatcatctctgcctgcagagtggtttccttatcttctactatagcccttagtattttctaatctatcttatgattggaagttgacatatttatgattcaactgtattgtaaaatccctatcagattaaccagccacgtctctctttggcagcatccaagcagatctggtcttgaatattgcttctgcaactctctctcactttgatgttgcataaggtatccaatttctctcttttattcattgttagtgttatgattattgaatttatgtaactgttagctaatctccaaacccactttttccagctagacataattctacagcctcttttaggattaggtatggtcatgtgacagaattccagccagaagagtgtgagcaggagtgatgtttgccattttggggcctgacccgtgaaaacttcctgtgcaatcctccgtgcttttttccatttctgcagcaaacttgggtgccatgttttgaagatgggggtgtggtagcaaaatttcaagatgttctccagtgatccttgcctcctggtattcatgccccatataattctctactgtcctgagtacgatggatgtgtgccaccaataggatattgcagaaagggcagtgtgtgactcccaaggcaaggtcataaaagctatgtggcttctgctgtaacctctcttgcatcattctctttggtggaagccagtcactatgtcataaggacactcaagcagtcttgtggagaggtccatgtggtggggaactaagacctcctgccagctgccagcacaaattctcatttatgtgagagatcatcttagaagtggatgctccagtcccagttcaatcttcagatgactgccaccttgcaagagactctaagccagaaccacccagacaagccactcccaaatttcttatgtatggaaactgataatgcctattgttttaagctgctaagttttgggggtaatttgttatgcagaaatagctaactgatacagggggccacaaagtgaaaggggcttaggtccctgtgactccctaaataggagctgcccactgagacttgggctttgtctctaagtgggaatcccaaggcttaagctcctttagctttatggtaaatctgcctttgttagactccagtacatgtctctgctttttcaagtctttcttttatggctattagtaaagttttgtaatttttttcctgtaggttttgaatatttcctttttttcattttcttttttcctcctgtttatttctatttctagccatttaatagttggttttgtctttgtagattgaatggaatttaaatgatttgtgtatgttgatctttatattctgcaactttgctcaattctcatgtaaataaagaaatttgccagttaatcttgaattttctagataatcatatcatgtacagaaaataacagttttcctttcctttgtcagtgtcttatttctttttcttattctattgtgttgacaagtacttctaataggatattgaatggttatggtgagagtagtttggtcttgtcatttacatgtctctccattaagcatgagacttgctggaaacgtctagtagattgaatttagcacattctttttgatgtctagtttgctaaacatgtttttttttaaccaggtattgttttgaactttattaaatcatttttgacctctattgagattatcatacaatttttctaatttaatatattaacacagttgttaacataaatagatctttgtaatttcaaatgggtcttgtattcttaatataaaccttatttggatataacatatgattcttttaatatatattgttgattttgacttgatagtattatactaaggtttttgggtgcatattcactaaagagtagcacctactattttgttttctggaattgtctttccctgatttggatattcttgttttttttaactagtgaaatgaattagtaattttttgtctttttctgttcccctgagcaattcctgtattagagggtctgtttctttaatgttcagtagtatctcatgcctaaatctgtgtgggcctagtgtccttttttccctctcttttttattgaaggactaaagctttgaatgcttttgcagtttcttccaaagtttatcatctactcagcctttctgctttttcttaaagttaattttaccaattaaaaaagtcttctctacaattctctttcttattcttaaatttgtttattctctactaatttcttagtcagattttctaaggctttgcctattttattagtttttaataaaatagcttttggcttaatagattaattataattctttggtgtcatatcttagtagcttcttttaccttcattcattcatttcataaatttcctgtatgcttattttgatcttcttctagcttcttgagctaaaagtttagataatttatttttagtctttctcgtttttagataaatgcatgagtgctgtaaatttttctttgagtacagattaatctttatctgatatgctttgatataaaatgttacatggcttattaatagtgtataatttatagtttgagttttagctctttggttcagtgttttaaatttttagataattcttattttcatcttcttttccctatttatcttctctgtttctcttcttattctaattttacataaatatggtcaccttattgacgtatgactttaaatttgttgatattgttaaatccttaatattttttggtccattggccatatcaatgagagcagtaattaggaatttcctaccatgataataagtttgtcaatgtctcattttggttttgaatcaatttttgctttactaattttgaggttactttattaagtgcattcaagtttagaactgttaacagctttttgaagacagggccgttttatcatgatgtaccaccctctctatccctcttaatgatttttgtcttcaaatctattttgtctaattataacatagtttgcccagcttgtttttgattaatatttacctggcatttatttttgcatcttttgttcaacctttccatgtccttagcttaagttatgtgtcttgtaaacagtgtagagctggcttatgtttttgttttatttcaagctgataagctcccccttccattagtgagtttcattcattctggtgtattgtaattatttatacatttgagcttgcctattctcatcttgctttttaatttctatttgactctttgctatgcttctgttttctccttcattgaatttagattgagccaaagtttcatgatttattgatttttatttttattttttttttcagacagagtctcattttgtcacccaggctagagtgtagtggcgcaatctcggctcactgcaagctccacctcccgggttcacgccattctcctgcctcagcctcccaagtagctgggactacaggtgcctgccaccacgcccggctaattttttttgtatttttagtagagatggggtttctccgtgttagccaggatggtctcgatctcctgacctcgtgatctgcccgcctgggcctcccaaagtgtcatgatttatttttattagattttctctctgcaagtttagatattatgtacttatataatttacatatgttatttccattttatatcatattttatttctattatttcagtgggtccccagtgatatttaaccatatttgtagaatgtaacaatgtctaaagcctgagctcacatttttgggggatacaggtgagtaggtgaacggaggagaacctagggagtctatgattcatagaaacctctggccagagtccaggcagcatggaattgtgaggaggacaaatagaaagttgacaagaccggcaaaaggagcaagacaggaagcccagaagagcacagagtctcagaggcatgaatgtcggcctctcatgggactgtttacggacctgccagtgtgcacgtgcgtgtgctcctgagtatgtgaatgtgtgtgaatcatgcttgcacatgtgtatgcgagtgtgtatgtgtgtgtctgtgtgtgtttgttacttgagaactgaggacaaggagaggcaaagggtaaaaggcaaagggtaaaacggaagcagtaaatacgtctgacagtaagcaagagttcattttcactggacatagtaccaaagagcaaagtctgaaagggaagaaggcagtgagggggctcagcccttcctgtcacaggggaagaacacgttaaaggtggatttggaagagtgggtttctttccggaagacaaatggatcaagagaaattccatctacttgtatcagaggatacaggttgacctagaatagtgacctaggcagacaggactggcatagttcaaaaaatctcctttttcacagtgaaagcccaaatgacattatttctgagacttttatcctgcgatgttggtgttctgttttgtacactagctatcagcacaagaatcatttgttgacaatggttactaaagaagtttcaggtctcatctcaatgtaatctgtactctgattaaattataaacagatttctagaattgaacagtgatagtccatatggtgtaggaagggagaattcaaatagaatattctctcaatcggtgatgacagcactagtgacatgtcagtttatgagaaacagatatagtacataaaatattcccttgtctggtttacttctttccatagtcagggctatgaaatcttttctgaactaactgacacacaaaatgaagttaattaatatgattttaaaaaatattatgtttttcattctacagggtgttttttgttgctaatagaactaaaatctcagcacattcacttccaacccaaaatgaaatgcaacctttcagtgtgacgcaggctttcttcctactctgtttcctgtcataatctatgttttggtaagtaagaggatgaatggactatgccttatgcttataaaacaccttttattttaccatctgtaagccttagctaaacactgctgatagtccagaacagatacagagacaacaatgcaatgaattagagaataaaagcactgatgagaggaagcaaaaaatggaaactgaggctgtgtgctttatttaaatggtacagttcctgtttagaaaatgaaaatcaaactatttgaagtcactttggactactgagttttctttttatatatatatatatatatatatatatattatttcaatagcttttggggtacaggtggattttgtttacatgaataaatgctgtagcggtaaagtctgaggttttagtgcaccctttgacttagtagtgtacattgtacccaatatgtagttttttttttaatccctcaccctccgcctctgagtctccattataccaccctgtatgcctttgtgaacccatagcttagctcccacttattagtgaaaacgtggtatttggttttccattcctgagttacttcactctttgaataatgtccttcagtttcatccagatgctgcaacaggtattatttcatttttttaatggctgagtagtattccatggtgtatgtagaccacattttctttgtccactcatctgttgatgggcaagtaggttgtttccatatctttgcaattgtgaattatgctgcgataaacatacgcatgcaggtatttttgatatatgacttattttcctttggataccgagttttctagtgcaggttttgctgtgaccactaactggagaggccttggcagcctgtcatctctttccaccctgtgggtctcactgcctgggaattcacatggttccttttagcaggccttcacctcacatctttatcctggcccctttcttcgctgccacacctgggctttacacctcccactggcttctatttgctgccacataaactccaaatggctgtgaccaagggccaagttcacccttccatcccgccttgagttctcactctgacacccggaatatcagcactggagacagctgcatgctccccgtgggatactggctgcctcttctggacgtgagacaatttgagtgcagtatttctctagttgctgacccttcccagctcctcctttcaggggatgtggtgtcatcctggcattgtcctgtcctaacctagccctgctggtctccatggctgcagctggatatccaaacacccaacacacataatcatggctctgtgccgtgaggaggagacaagaaccccccaaaccattctgtcgagtttcctatggttgggttctggttgtatttctcttcttttcttttcttttcttttcttttttttttttttttgagacggagttttgctctttgttgcccaggctggagtgcagtggcgcgatctctgctcattgctacaacctctgcctctcggattcaagtgattctcttgcctcagcctccctagtagctgggactacaggctcccaccaccatgcccagctaatctttgcatttttagtagagacggggtttcaccatgttggccaggctggtctcgaactcctgacctcaggtgatccatctgccttggcctcccaaagtgctgggattaccggcatgagccaccgcacctggccctggttgaatttcttgggagagttgcgtgattcaccctagaaccccctcattctgctctagcggcaggacaggctcccttcaagccagggccactgttaatcaggaaaaagaggtgatcaagaatgttctcaattcaagagggtcagaaacataatcaacttttggttgatgatgggaggcctgttttaaagtttggtcctgaagccctaagcatgcgttttctggccatgaggcacctggggaggaggctggttgggagagagctccttcaaccaggaggctgcctccttccagggagagtcacgcggagacagctgaagatgctgtcatgattagagtcaggtcagtatttcttctctgtgggagcatcccattggccaggtcatcattccagaatctcagatgcatatctttcaatttcccttccatccctgctgcagtccgggtcaggatctggcctctcaccatcctgggctgcctatttctaggatctccccctctcaccaatctcatgcagcaaccagcattacattcctgaaatatgggttgttgcaggtccctcttgtctgcaggatagagtgtcaacctctgggtgtccgactagcttcctccacatgtccttataacctattgtattgatttaagctcatttcctaaggggtctctgcacttggatgctctgaacctgtgtgtagttggttcccttagcctggacagctcttctcttcctcttttccactgatcacgagacttcacaattgtgaaatcctttctttaatgcttccttttgtgggaagaacccctgaggtaatcagtggggttcactgaggtcccctcctcttttcctctacaccactgttttatgcgtcctgtctagcctcgtgttgaaagtgcctatttctgggctccaattaggctcattctccctcttttctttgaattatcatgaactgaattgatctgtcttttaaaaagttatccttgtaaattgggtctatcttttaagtattaaccttatttccctcaattcaacttatttccaaataattattaggcctgcccattaggtgataagtttttttaaaaataatttgtcactgtagaaatattcaaacatatacaaaaatagagagtatagcctgtgaactcctacatccctagcacccagctttgtcactcctccatattatgttgaagtaaatctcagatatctttctactataaatatttcaccatattcttttaacagctaaggaaacttaaaaaataaccatcatacaatttattacttaaatttattaatacatttttaatatcagatggtaagttacaggatggagctgtgacacccttgtcatgaacaagcctacagttgtagacttatgctcacaaagggtgctcagctccctattaatgaattgattgatgaatcaattaaatgatgttgtgattattggctatcactgacacttgcagaaggtagcgctctcttgtgctgatttcatgttaatctcatctaactttaaggagctcatttcatgacacatggaatttaaaggccagtactctacaattcatggacactcttctaactcaaagtagctattaaggaaaccaatcttaaagtcaggatgacagggaccttaaagtaccaattccatttccagccttatagactcaaccaagttatttaatgtgtctaaatccagttttcttataggaaaaagagtttctaatagtacctatctcctaggatttttgtgtgggttaaatgagatacgaaaacacaaggcagtgttgggtacttagtaagtgctcaataaatattatctgttctcattttttatgcctgcagagtataatatccttttttctcccacttttaaatgctggaagaagattgaaaatggcaactagcatctcataaaatgacataggataatttagaaaagtggggaagtatttatatctgaagtcagcactgtataaacatcgatatgagccaacaatattgtgtgctctccaagtgttttgcagaagcagtggggctcctgctgagacgtggtcttgccaaaccccctcaagctccaaagatggtcttttcaaaatctttctcctctattgccccgggccatgttcttccagaaaactgcctgcaagcaatttccttaatcgggttgctaagggcaaccccaaagaaacaacataccaagctatctgtctgtccatccgaatcccaaaagctttccttgtgcttcctgctctgaccaaagaggcatttgaggcacatgtgagagaacagctttccagaaaccacacttgagtccacagcagagcggaaggggcaggaggcatcaggaccatttccagatttctctctggccctgattgtctagatttgcatccaatcactgcaagagtttatacaaaagttgttagaaagatttgggtttcacacagagttatgaaaacaaggtagaagcctgatgtcttcatttcccatgaaatcttgtgggtgtaaatgaaacatgttttagtctcaaatcctggagctgtggggttcacaatggagaaatatccaggtctcttgaacaagactggacgataaccagggacagttccctttttcccccacattcatttatgagttggtcaaactgttgtctattcacaggagattcttagacatgagagctatgggacaatctcttttcagatcctgacagtgtccctgggaaatctttctgttcttagtaaatatcaagtcagataaatcaataaggctggcgatggagctgaaggtaaaacaggaggcactaaatcacagaccatgcaaattcatgtaattcttagctttgggaggtgtttaatgctgtgtaataaacaccatcaaaaatctcagcaacataaaacaacaatcactgattctttaaaaatcttgggcctctaggtcagagagctgatcttggcttcaagttcccagtgggttcaggcttcctccatctgtctgtcattctgggacccttgatgacccaggatgtagtcagctcatggttgttgctgaagccaaataagggtgagcagaaatgtgatgtttctgaagccctgggctcagaattggcacactgtcatttttgcccatatcttattggccaaagcacaatatatagacaagcccaatatcaacggagaaaatgaagtccattcacagtgactcatggcaagggtgggaaggaagcaagggttgcaagcagagaatacagtttaccccacagggtaactcaagcaagtcagcctggcagggccaaggtcagtcttactttcttggcaactggggtggcattatacactggagctcagtggcccatggctgagagtgtatattaggaactacaatccaagtagcctaaagtacagcccaggcttgtgaatttggaaatttccatttttaggaaatttgatattgctctgtgtgccacccccatatcccaaggtataagcagtgcagtagctaagtatttttaggacatgcaaatttactatattttgttggctacaagataatagggcacacaggattttctaaagctgcaattccaaatggcatggactagaagccaggttttctcactccatgtcaagggctattcttcttctctctctctgtctctaacaatattgcaacgatattctgaatttagttgtaaatttagttggaatttgatataagctatttgattttccttcacaaatttgtttacagcaatttcctcccagaacacactgataaagagaagtagatgacagttattgatgaaccctgcttctggcagttattaatcagccattgacttgatgaagcagccatggatgccacacctgatggtgaggcatgtgacctggggtccagctgccatgggtcatccatgtggctttgggagtgttgggaagctactgcttcagcatctccaaggaacaagcgtcctgtgagagtggaagtgagaggtcagtaaagacagacccgttttttgagcccttactctgccaggcattgggaaacagagaaacagagtttctgtccttgtgaagcttcagcctagtggattatttctctacaactgtcatggaacattaagaaataatttcaaaagagtgaagggcatggtaggcacattttacataagtcatttaattggcgcttccaaatgcctcttaaaggtacgtggtgatcccattttacaggtgagaagactgaggctcagtgagttctagtaacttgacaaagccccacagcaagctgacagatgagtcaggattccagtgcagatcaactggaccccaacgtctttgcttttcccaccacatgacttagggagaatggaacatcccatttcaggagaatgtgatgtctctgaaattctgtcttcagcaatgtcctctttcaaattttatgtgttctttgctacctccatttgggcagaaattgtgtcttataagaatttaatcccctgaagcaattggaatggtactggagaataaacaaaacaaaacaaaaccaaaaaacaaaaaaaaaaaacccattaatgttttaaaagtagaaatgcaaacacagcaacaaaaagtagccctaattgcaaagcccaatagaattgtgcttgagatgatttgctgctttatttttggaagccctccgtattacccacactattgtcaaactcttcttgagcagtgaacatcaagagatcatggattaaatgggaaaattagtgtcaagattacatcagaagaaaggcaagtatcgcatcatttcactgcccacaaaaatacattctttccctttccctccactattttaagacttcattgaccttttctaaggtcccaatttccatttaacctctgtgccagtcaagacagcagtcccaagtctctaactttcttcacccaatgatcactctttgaactcaccaagcatgctacaaacagaaggaagccattagcagggggagttcgaacctatatagccaaccataaattagaagtccaaggaagcattttcaaccactacgaggtcactcaggctgactgctggcagtggcttctcatcgatgacaggtcactaaagaattctctctaggcggctcatttctggtggcagcaatattactgtttggacttctgaaatgatttttgtgatgcacatggctgccagaggcaggaattctggaatcagagaggagaaaccacttacctcaggggctgaaggagcctttgggcttcctggctagagtgctgaggaacttggtgctctcaggctgctggtgggaggagagacctgggtttgaggaggtgactggccaggcttatggacggggatccacatgatgaatttctccagcccctgtgcactcaaactgccgtaaaatcagttagtgggtttgcgctttgagcagctctagtaattcatttggtgtgtctttatagtttacaaggcactcttgcttctgagtttcccttggaggctgaggccactcccagaagcccagtaaagagcagtggccaagtgcacaaactgggcctgggctcagatcccagctctgtcgctttctaactgtgtgacctttggcaaactacttaacatttctgtgcctctgtttatgcatctgtgaaatggtggtaagactagtacctatcccaaagagttgctgtgaagttgaactgagttaatatttgaaacacttagaactgtgctattaaggcattagcctaagcttctccattttaataggtgaagatatttggaaatctatagaggatgatttgctatagtttactcaagtgacttgaacctaactccccctccaaagtctgaccattattccacatggatgttcctttatgcaattttctatccatctatcccagccagattccatttcttgctgtaattcgaatattttcacactggattttctaggaaatgtggccgagggagggctatcttaggtatacacttacactttttaaaactgttcctgttttgttgtgtgtacttatgctcaggttttgagtttacccctaaatctcaaaagaagtatattgaaaagtatgaaattgccatttattataatgatgaaatcaacttccttaagaatttcacatatgtcaatgcatagaaattatttcaaataaagtatgtttctgtgaacataaaacatttacttgttatgacactgtaatcagggcgtcacagattctaggatatgaaatgctaagcaccccatctctaccaaaataaaaaaaatttagcccggcgtggtggaacacactgtagtctcagcttctcaggaagcaggggtaggaggacaacttgagcctgggaggctgcagtgagctgtggttgtgtcactgcactccagtctgggtgacagagggagactatgtctcaacaaacaaacaaacaaacaaacaataaataaatagaaagaaatactaagtagacatttgattatctcatgcccaggttgtatctggagataagggtatgctggaaagaattctggactaagaatctggaagtctggattctaatctcaaatacttattgcattcatggtgaaccaattatctcttgagttttagttccccatttgtagaatggcactgggtgacctttccatttcctcctcattccaatatttctattactctgtcttggtttgggtttcttgagaagcagagaggaaaagttaattgggaggcaatctcaggaagcactgttaggggtgcagggaagtgagacaaaagagaaggcagcccataatggtgcagcaccaatccatttacctcttggggccattggagcttcatccagctggaaaccctgggagatagtgtgggacatgcctcagactgagggagctggggtatttacaccccaactcctgtcagtcagagcttgagggctgttctcaaaggctcttctggtctgccacatggaggaaaatagtgcaggaagtccttttggctgaagtgtactggtgctgatgatgagaaggtgggcactattccctgaagtggtgtaggagaggagcacctgctgtttgctacacattgacctcccagatctgcctgtgatttggggcttatagagatgtgttgattctgtctagtcaaagtgagagtcattgcagaacaaaaccagaatcttagtggtgactgtgcaaagccatttggtctaatgattttaccaagagcatctcagaacactagtattggtagtatgtagccttgttaataaatatatacaagtacatgttgaaatgacttgttattatatggctagagcaaacccacgtcatcctcatgatgtcttgctgtcacaatctcattctctcttgggttctgacctgactcctcaagcaagagaacaagggttggcagagctctccaggaatgcacagccccaggtgcccagcagagggcatcaagtatgacagatattggaatgacatctgttgtgtgtgcagagcagactgactgagtggaaccatgaccaaagagaactcaggtagactcaagtgcttctgggaaatttgagaaacttccctgacagagaatttacttcaagtcagatacctccccaataattgaaaatcctgccaataatgaggaaagagaagtggacccaaattcctatttccttgaatctgctcttcagtttgttcatgaaatttgctcacctgataaatcttgctcgagagcctgccatgctccagcactggggacccagcagtgaaaaaaccagtacaatctggccctcacggagcttccctgatatggtttggctctgtgtccccacccaaatctcaagtcgaattataatccccatgtgtcaggggagggacctgacgagaggtgattggatcatgggggtggatttccgccatgctgttcttgtgatagtgagtgagtctcacaagatctgatggtttaaaagtgtggcatttcccctttggcgtgggctgtctctctctcctgccgccatgtaagacgcaccttgcttcccctttgccatgattgtaagtttcctgagacctccccagccatgcagaactgtgagtcaattaaacctcttttcttgacaaattacctagtcttaggtagttttttatagcagtgtgaagaaggactaatacattcccttttagtgagaagacacaggcaataaacaaactactaactaaatgcacagtgtcaggaaagagaaattttaggaatcggaacgaggcagggtaggggagtgtagaggttcaggagtggtgttttagtttggtgttgtgcccagggcagaccctcagataaaatgcctttaagacaagatcctgtggaatggagggaggacctaaggaggcaatgcagatgtctggtaacggagggtcccaattagaaaacacaaaagatcagaaaacctaaggcctgagtcagggtcagtacctgaagtggggctgagcagggtgttggggacgagttgaggacagagagggcctgaaggtgagatcagttatcaatcaggttaggccttgtgaagactttggctcttactctggatgggaagtagaggtctggcattctctgcctttcatttggaggggaaccctcaggagtggaaggggagcaaagctgggaaaagtagcaataaagtacctgcaaatgttttatatagattttgttcacatctccaaaaaaagtgcaaaaactcccctagctctgcattttccagccactgtggactgaattgtgcccctccccaccaagttaatatgcagaagcccgaactcccaatgtgacattgttagggggtagggcctttgcggggtgattaggtttagatgagggtatgagtgtggaacactgagggtggggtcctgtgggtggggccctccctctctctctcagccatgtgaagatatagggagaaggcagccatctgcaaaccaagaagagggttctcaccaggacctggccatgctggtaccctgaccttcggcttccagtctccagaactgggaaaaagcaaacaataaatgtccattgtttaagccctccagtctgtggtattttgttacggcagcctgcgctaagacaccagccaattttgtttctgttttccctccctgaagtcagtgaggatgggagctctctaggtagcagtgtgagggtctgagggagaccaccgagggacatgggtggagagggacagtcatgggtctgagaggccagcaggggccagatcatgcctgctttgtaggacacagtgaggggctgatacttcaagatctgtgggaatgggagcgggagcccagggagggctgcagggaaggacttggctctggctgctgtggagggagagcaggtggtgggaaggcagggcaaaaagtgaggagtccacaagagacactcaggcaaagtacgggctaagattgcagtggctgagacaggggcagccgccatgaggatgaacatcaggaacgccacagagagggttgttccagatgactccaaaagccccctccaactctaaagttccaatcattggatgctcagcgcattagcagtgtcagatatatatttcttaaccataccagaggagggagctggggactatttgggagttagaagtatcaaaacctgtgggctgaatgaggcagtgtgtgtgcctgtgtgtgtgtgtgtgtgtgtgtgtgtatgtgtctgcgtgtgtgtgcctgtgtgtgtgcatgtctccatgtgtgtgtgcctgtgtgtgtgcctatgtgtgtttgtgtgtgcgtgtgtggctgcgtgtgtgtgtgtctctgtgtgtgtgtgcctgtgtgtgtgtatgtgtgtgtggtgtgggtgggagttgatgaatggggagaactctaggaagagtcccagatgcaggcttgagcaaatggcgcagtggaagggcagacaggtggagtgtgtcactggccagaggtggggggttgcaagagaaatcatcaacccttgctccagaggtcccaggacaccagaacttgtgcagtgaccttggtgacagggacactgccaagatcagatgctgtagggccgtgtggagaaacacatgaacctggggccaggtgggcagcagaaaatgtgagacaaagcagaggaaatgggggctctggggataggagggaggggctcttgggccactgttgattgggtttcctttgagggcttggggccttgtcctgggtgagcaccttcttataggatggcactggaagaccagcaggtgacaaggacattacgatgtggtatccaacacctgggtcactgctgtagtaaccagagttctgtcttttttctgaatgtagaattttatgagccaaacattaaattctttattttttaaacatgaaaatttcaaatacagactggttcaccatcaggaacaccacagagagggttgtttcaggtgactccgaaagccccctccaactctaaagttccaatcattggatgttcagagcattagcagtgtcagatatacatttcttaaccatacaatagatttcctactttaactacctaaatttgtttcaaaaccaaccactattaggggagttttgtgaacttacttcatgtgccattgaatttctaataggtgatatctaattttaaattgtagtttagagaaaaaatgttgctattctattgctgaaacataattgatatataaggagagtttggctttgaatacatttctttctctgtatatatttattttagatttcatgagcgagtatttgattctttaaatattgaggacattgcaaaacatgattttactggatttttcagaatcgtaaagaagaataattcttttatagtttagtaactatctaaaataatttagacacttttgaccttattttcttgatgtttctttgagatgaggaggtagtaattgcaatttcactttttctattgaataaaaaactaaatgaagtgtatgacacattgcttttctaacccaaattccacagtgcaacgtgactttgactagaaaagtctttgaaactagaacaaaagagcaagtggaaagggagactcaactagaaccaagtagctaccacatctgacagaagagtagattatttgcagtccactgaaggatgtgctggatgaagcagtgtgtttcctctcatcacattgcctgaactctatttatatactgtgaaatgttctgggatatttgttgagctttaaatttagtaaagcaatattttattgttctagcaacaaaaaaattaagttattacattaattagaaagtgatctgagaaccttattttgatataggaggggagcagggaagtgctgggaagggaagggcatggtccctggctaggaatccatccctgggtttgtgcccatggacctaggtgaggacagggatttctgtttttgtgtccaaatgttgcatttcccaagaccgctctggccaaccatgcccccatcctgtgcctgtaaaaaccctgagacattagcaggcagagacacaagtagctggacgtcgagaggaatgtaccggtagaggaggacatcaacagacgcccgcagacaccaggccagtaggccgtcgacaaatggaactatgtggtgatggattggcaagaaccttgaatcctggacatgaccattttacaatgttattgttaaatttttttcttgagcaaggtatgtataagtaagtaaataagggcataatgtcaggtaaactgaatggctggaaagtggcaaccaggatttagttatttggcattatcacaggtttttcagaaacattcaatttttagcaaaaaacaagtcccctccaaaattcaatctactgcaattgatttgcacgtggtttaatgctgttaatagtctataaataatggactcaaatatttgaagttgtagatgctttcatactgttttaaacaaacataacttatatgcaaatggttaagaataccagaaacattgcaagaatgctctttttaaatcctgaagatattgctttattttaaagcatcaaggatgatttagatttttggaaaaacagaggtggcatgaagatttctgaactcgctcacacacaaacccgtcacagccgctgtgatctataagccaaatttgtgttagaacttttcttttttgaataacaacaaaacaacaaaaacgctcctaactgaaactgggaaaggactagaaactttgttttcttactaatgtgaggttggaaacatattggctttcaagtgaattggccgtgaccacagcagcacttggatctgagggagccgagattgcaggcagatgtgagtttggcacttgcatgcccacgttaaaaaaacttttctcctttctcctacccgcacattgaggctggccctgctggagaggggcaaactgattacagactcacattacctggaaacatgccattgacttaacatggggcctgtctacttaggcgctgatttttgaaaatgcaatctttatccagagtatttgacaaatgctcagaatgctcagaaatgtattaatatacagccagacagctgtcaaagcagcaggcttctcccctggagagttcattaacctcatttccacttgctgagtaaggagctctgtcttgcctgagagggaccacggtaccaaaatgtacgggtttcaagtgaggagtgagaaaaataactgaagtatgagaaaataaagatttcttgataaggcccaaagactagctcatttcctagtatgtgttttaaatgcgcgttttctgtttattttacttacctatgcatttatctattcatctcttttcaaaatgctttgaaggtgcaatgatgatatgctattttatgaactaatttccttaatatacaaagagctcttttaagtcaataaaaaggtcaaagcttatgaacgcaaagagaagtgtaaatgattttaaaagattatcacttattagctgaacagagatgaaaactttgaaaatacactgaggtaaccagtgagaatgcatagtgctggtgaggttgtgttaattggagtgtaaactagtacaaggtttttggaaaacaattgggcaatatctttccaaatttgaaatgcatggatttccttgtcccagaaattccaccagaattcttctaacagataagaaagactcccattctgtaggttgcctgttcgctctgatgatagtttcttttgctgtgcagaagctctttagtttaattagatctcatttctcaattttggcttttgttgcaattgcttttggtgttttagccatgacttggaaccaatccaaatgcccatcaatgatagactggataaagaaaatgtggcacatatataccatggaatactatgcagccataaaaaagaatgagttcatgtcccttgcagagacatggatgcagctggaaactatcattttcagcaaactaacacaggaacagaaaaccaaacacagcatgttctcactcataagtgggagttgaacagtgagaacacatgaacacagggaggggaacatcacacaccggggcctatcagggggttggggacaaggggagggagaacattaggacaaatacctaaagcatgcggggcttaaaacctagatgatgggttgatgggtgcagcaaaccaccatggcacatgtatacctatgtaacaaacctgcatgttctgcacatgtatcccagaactgaaagtttaatttaaaaaaacctgggagttataacttttgttctggggaaaaaaaagaaagactccctcatgtgcacagaatttgaatatggtacagtggctaactctggggttgggaattggataccaggaggcagggtgggagagaaagtcatttgttctctgttccatttgtattgtttaggtttcctaagcatgtgcctgtgttatatagtcacagaaagataatttaaaaatatatttgttgatgcataaatgactataaattcactatataagaagaaatggcttacaaaattaatccaaatcaaactaaatgataagaaagtgataaatgaatgtaaagggaaaatggaggtaggagcactaggatgaagccagggtgaaatcctgtgttatgcgtggatgctgcaggtgggctgaagttcctagcagcaaataaaatagtgaagggaagtgtcacagggtgagacatgatgcaggatgtctactgaaagaaaacaatcttttgctagtagtataactatcctagtcctgagattaagagaaatttctcctgtgggtcctcacagaaaggatttaataaataatgtcctcaaaatcaagcccagggtaaatgcaacagtaagtttcaatatcaatctatccttgaggtagattagattacggttcaaattctcatttcctccatgtaatggctgtcctttctacctttgcctggagacttagcagtgcctcccaccacagcagacagaaggtacatctcactctaccctctgacatcagctccctcatggaacttcctttggccaatgagccgagagcagaggcgtgagttgtgtctagccagagggttcaaatgtgcttgcgtgatttggcttggctttttgagcttcagctttctccatgggaaaatcatgccctgagtaggcattgctccttcaacctgtgtcctggaatgaagacacatggaacagtctggaacctaaaacaaagcctggagttcagctgagatcagctaaggtgtggctgggacctgtgcatatggaataaatgtttgctcttataggtaaatgcgatgtggaagttgttcattactcaacattattgcagcagaagcctggtgaatatatccttagagatagagggaaggaagtgagaagaagttcaggaggaggcttttgaattgctggggataatgggaataagcaagcactctaataagaggatatgaacttcccctaagatcaagaccctatttgaagactccaagacgttactgatgatgaacggattactatatcaggtaatacagtgctctgtgagtgaactgcaagagtaattacttgtatctcaagaaaaccactccatgattctgaggacaaatcctgaggtcattcattgaaagaatgaatagaaattgggatggataaataaaattgtgtgtgtgtatgtgcatgtgtgtgtatgtgaatgtgtgtgtgtatgtgtaagtgcacgtgcacatgaatgactacgtatgtttatgcacttgtgcatgcatatacatgtacgtgtgcttgtatgcatgggtgtgcattatgtgcgtgtttgcctgtgtgtgcatgcatgcgtgtgtgtgtgtgtgtgttctctgtggagggaggagactggagattctcttccccaacattcgaggccagtttgccaaaaatcttggtgctaactgtatgtccaggttacagatccacacgcaaatgcagacccaacaacactgaggctcatcttttgggtttctccccatcttcttcaccatgactcagttctccaagaaaaatgttgttgctactttcaggaacagtccaggatgagagcttaaggtagagtctggacatgtgcatggaagcacagccatgattctatctaattggctcaaacaaaagtcttggacagtattttggcttttttttttttttttttttgagacatgatcttactctgtcacctagcctggagttcagtggtgcgatcataggtcactgcagccttgatctcccaggctaaagcaatcctcccacttcagccccatgagtagctgggactacaggtgcccaccaccacacatggctaattttttattttttgtagaggtggggtttcactatgttgcccaggctggtctcgaactcttgggctcaagtgatcctcccgctttggcctcccaaagtgttaggattataggcatgagccactgtgcctagcctatattttttgtgattggttttctgagtctataaagaaaaaaggatgttcttcagctatttggggacttttggctccaccccaggcccataagtgaatgcaacaacaaggtttaatgactgttggacactgtgtttatcgagagacattctgcagggaagcagaaacaacataattgcctataaaaacatcctttaaaaagttagcagtctaatccataaaaatgaattttggcaggtgcaaatgtagccagggccaaggcagggcgtgcggtggatgggggcgggaaatccattcaggcgcggaggcttgcctgttgttgtccctggagtgcgccgtcctctctcttgttcctgcttcttttttactctcctttctcctcagcagccatcctcacaggtttgatgtgtgtccttctttcctgccttcctgctagctctgaagggcatttttatttgacatggatgtgtatgggggatgtcccctggctcctgacgctttttcactcaacactgtagctttaagacctacccttgttgcgcccgatgcacctggttggttgcattaacttcttcatggtattcctgactgttccttactgcattagttctccgtctctcaatcacctgcagcttcccacaggtacaaacaatgctgggtgaacatcctggttcacatcttccgatggaccggggtggggacttccctgcggtatgtacctagaagcagattccctggatcacagggtgcttgtagatttagaagatgtagagtagtctgtatgtctcaacttgaagtaattcttgcattttgttcttccttcacagcccttccacaccaattcctccagttggtctcccatttctgttgtgatgctgctttcctgcaggctgggtacctcccagtcatctttgtcttctctcttccctttcccttcatatccaatcagcttcctcatgctcctacctcaccaggtctcccatccacacttcattttttcattcccaccgtcacaagtctgcatcagatactgatcatccttgaatagatgaacagttttctcactgtcccccacttcaggactctccctacatgagctgattgtaggtaaaaatgcacatttgaatctggttactccctggcctccaacatccagtgactccccactaccttctgggctggaatctcagagcctatggaaaatgactctggtcttctgtccccagccaagcccctcctttagtctgtctcttacaccctccttcctccagctcctcctcactgcccttgagcagtaccaaacctctccatttcttccagtccaggattgtcaaacttcagagagcagagggaatctgaaagaaagggtggagaaggctaatgatcttattgtgacaattcctgctgaatggatccaatgagagaatcactgttctgcttgctcatgtattgttttagtttgttgcaataaaataaatatttgcatggaggggaaaaatggcttgattttccctggtattgtttcctttaataggatctctttctctcccagcccgttcctgttgatgtcttggttggggtggccccctgactttcatttttctgcatctcaagttccaaatttgaagcctgatgatctgtcagtcagggtctccagagaaacagaatcaatagggggagcgggagaagaaagagagagagagagagaaagagagagagagagagagagagagagagatctgttttaaataaatgatgtatgcaactgtgtggctgttaagtctgaagtttgcagggcagtcctgtaggcttgaatccaaaggcagtccagagggagaattttctccttttatgcagggacctcagtcttttctcttaaggccatcaaccgatgagacaaggtccacccacagtgtgatggggaatctgctttactcaaagcccatcgagtccaatgttaatctcatccaaacacaccctcacagcaacatctagactggtgtttgaccaaacagctgttgggtaccatagcctagccaagttgacacataaacttaatcatcatgggatcagtcccaccatgccccatgcccatctttggaccagtgttctagcctcctgcctgttcaggtgagttatgggagaaaacttaggaccccatgcaaatgcagactttcttttacattgtaaataccactgacattcttgctcatccaactgggacatttttgccattcagtttgtcaagcaaatataacgatgcatattttcagcacacacttccactgtttagcagatggcacatctgaaacatggtacatgggtgtaggcaattatttgactccctagtgccatatggtgacatattccttcttgtgatactagaatataaatatgttaaatgttttgtgtatgtgtgtatgtgtgtgtaggcatatgcgtcacatctggaatctcaaaaatatcaaggagccagatgtatattcatatgatcatatgtgtatatacacgtatactatccactcctttaacatagtaacagcttacatttttatcctttggttttattgaaggatcctgtaaatgaataaaaccataagaaaacatatggaagaacagtcaaataggttataaatataatcaacactgttttaacagcatcacagagcaagcatggagggaatgatattttattgattatttagagcctaagccaggccttgtgcaacgcatttctcatgtataatcttatctgacctcatgaaggaggattttccttaaactggggagtctgaggcttagcaaatgaatcgcacaaccaggatttgaactaaagtttaccttcatctaaatacgcgtttttctttctctctctctctttttttttttttacccctatcgcatcatagccacatctgtggccacacaagaaatactttcccaacactcagtagctaattattcataaggttttagggtgacggtgggccatgtgcagagatgctttgaaagacttccaggaaaatcatgctttatggcttagaatttggggacatgactgtacctgaattgagatggacaggaaatcatttctccctccttcctgcttcagcacacccctcttcccactcaagagattctggagacgcttcaaggccatctccttgccagatgcctctgttttagaaaagtcatttcaagtgccccaaggagaatggattggaggggatcacgttgggagactgaacatgtaacacaggtgggatatgatggagatgggagttggtgggaggccatctgggtagtataatctaccagacttgggggtaggtggcctggcaaattgggggagttaggccaaagatgactcccaagtttctggttttggccgtggggtagatggagacaaggttgggaggacagatagttcgctttgagtctgtggagctggaggtgcctgtggccacctgggtggtgatgtggcctccaggagggagctggcatggagatggagctccaggagccacagtgactggcatagtgccaggtttctaataggtgtgcaataaatatttgtgaaatgcatgggatgtggggggtgttgagccaggcacgtagactgggttggaacagggagctgacaggtctgcctctgaaggctgttactgtctgcttagtagcaggggttgttatctgttggtggggaggagtgggtggtgatgtcttaggattgagccgagaggagcactatgagctggccaactatttgaaggaagtgggtcaatgacaaaggatccactttgtcaaagacaaatgggaatgacaaagggagccctgggctgtgtcaagggcctggttgaggttgatgctggaaatcatcaaccatcaaccatcatcaaacatggtggttccagcccactaggtgttacgatgttgtcagcaggtgtgggcttgggtccacgtagcagcagttggattgattagtggttggggtctcactgggtacgtgccataaaagtgaggcaagaaagttgatgtgatggacaggaatggggctgatgggatagactgggaggtcccagaacacaggagaagaagggcctgctgcagttgaggaagttgagctctcagtgagcagaaggaaaagcgaggtgggtgcaaccaagcgactaagggggcaggaaaggggcttccggtaagagtcgaagtgtgaattttaatttcggtggttctagggatggcaagatccaaggtgtagccaagtgaaagagttgccaaggtgggatggagagggaggtcgctggaggtgagcagcccaggacctgcagatgagaagtgggattagtggtccccagaaatgccgtgttccaaggggaagccggcggtgggcaaaggactagcagagggttcagtccgaagccgccaccagggggcgcgagagagcagcaagccgtaacagctcgcgtaaaaggcgggagctggggcttcctgggggttccctagaagcggacctcgagacaaggtcctgggtgcaagcggtttatttgggggatggctgcaggaggcacagggtaggagcagggctggcagggaagggagagaagggaggaagggcagtgaagagcacaaggatggaggggctactcccgggcctgtgtgcagagcctcagccctggctctgtcaggcagaaggagctcccgacacctctgtcatctgctggctgcggagaacctggggctgacgccgtcctccgggacctccatccagaaaagggccacagaggctgagggcgtcggggcgggcactccagggtcttattctgtttgggctgctatggacgaaatgctgtagacggagtggcttagcaacgacagaacattatttctcacagttttggagtctggaaagtccaagatcgaggtgctaacaggttaggtgtctggtggagcctgcatcttggttcccggtggcgccttctctctgccctcacgtgggcgagggagcaggctggggcctcctttataccgtcgcgaatcccagtcacgggctccgacctcaaaacataacctccgtccaaaggccccacctcctaataccagcgcatgggtgattcggtttcccgatgcgaatgcgggagacacactcagtccgcagctgccaggtctcctgttgggcgagatgggtgtgggaggggcaggaggagtgtcaggacccgagcgggatgctgtggatgacaagggagctgctctcacctccccgccccgagacagatgaggcactcgaggacctgcagcaggcctcagagagggctaggaccagggaggggctgcggatggagagcagagtgacggcctagaaaggaggttcccgagggctctggggaggcggaagaggggacgcggtgtgttgagatatggggagaagttcagagcagcatgggcatgcaggtgcctgcagaggggcccatctgggctgcaccccagcaggacagggccatggcttggtgtgggttcggctggctgcacagcttcttgcaaagtttgtccccagggtccttgggagtagaggtctttcggaaggcaccatctccagagcgtgtttctgagtaactctgaggatgggttccgggttatcactgtgtgttggaaacagcagcgcccaggctgccggaggaggctggtctccctggcaggtcctggctgtgtctagagttttgtgggtcctggagataaggctccggtttgaggcccctggggctggcatgtcccaggggaatggccagagccagttctctgtgttctgaggctgtttctttagtttcctgccagagagtgtagcctcaaatgtgctgcctgactttcatccagcgctagactgggatggataagaaggacttctttactttttgtcattttcatgttttaaaaattgacataatcctttcctcaaatggggcattatatccaacctaatatacaaacagatttaggtggagctgctgggagaaagggttctgaatgtcagattcaccgtccatccactgccaccttcccaagtggccaaatggaacccagtttgaaaaccaccatttccgataggttaaatctaccccaaattggagccatcatcagacagccatgtacagacatactcttgctttgggtcctggagaaccatgcgtgcagggttgcatttgggtctgagtttgctgaggactgcccatgggtagcatcatgtggagtgtgcgttgtgttcattgggcctgtgtgtcatgaagacactgtgtactgttcatacagagaccctttgatgagacaccacaagagaaactccttgtaggagcctctggcagaagaaaaatggttttcttttgagctaccagattaaaaaaaaattgtggttcccctgaatcctataacagcatttgtctgcctgcaaagctcagctccaggtttgtaggccacccaacttaagcctttgtgaacacatttttgggaactgatgctaccctggacttcactgaactatcttacttcatttttcctttactcgtctttatttaatagttttattgaattatttatgtaaatctcacctcatcatgcttagaaaaatgaaagaaaaattgtctttggaactgtagggaacttggacaatttgaggttggttaaacttgggttcccaaggggcagcatccgagacaaggatttgaatgaaggggtcccagggggtgtgagcaggggagtggggaagtggggcagggaaggggaggaaccttggcagtggtgaagagcttaccactctgggcagctaggctcagtcctgcggggacttctgggagagtgggcagaacactcctcagagtggttccatggaagagcagggggttgggggctatttctccaccagctcccattattcatggtttaagcttggctcctgggcatgtcaattgcctggcacttctgtccagccctgcatgtgggccacacatgctgctggggccaaagaatgccttctagccaaaagtcacatgtgtttgccataggaagtggcagctggtacaggaaagtgagagccaagggtgtacaaatggagcaccaatagtgtggactgcaagggtcttctggaagagttgacatacaaatgccctcatttactcagtgcctgttgatggttccttctgagacccctaatgcaatgtttataatgcagactgaaagaacttgaggagctcaagtgaaaactatcatcatctttcctcttttgttgtaacatctacatgcgaatgtcatgtcacaggtgctactgtttatacacaaatcctgaccgatctcccagtggctctcgcagtgcaaggttagcaggaagccgagttgtttccctgagtcgtcctttacggatctggagggctgattttgtgtttatataaattggtcctggatgttctccctccctctgagggagcaggagctcgggtacactcaggggtcagtctgggacgtctgttctcagagcaaggtgcacaggacattaagggatgctgttgcttgtggcttgcccacccgaggtcggtgagcttgtgggtctgggtctgctgctcccccatttgcccctcacagccaggctttacacaaacttcttacatcctcacagctcagccaagaccaggccataacccttgatgagtctttactgaaggttctggagtgaccaagttacaatatgaaaagccactcattcctcctactggaagtgtctgtgtacacagctcctgacagttcctgcctgcctggctcctagcccagtgctgttagaaatctttcccaaacagctctacctttttgaaagtccagacccttgacatccatctctccctactgctcagaattgtctgtatctatcttttaccaatgggggaaaggaaagaaaaggcagataaagagtgctgcaccacagaaccttgggggattaaaaagaagcaggctgtgctgagagcctaggatcagaaagaatctcactgcaccctcaccttctttaacccaggcatagacttccctccatccattccaatacctggagtgtctcattggtgtagatgaaaacacggcagtcaggtataagcaggtcctggagctctgactagctcatttactatttctgaacaaaactagctttgtgcactttacagaaacaagtgggatggagggtataaatggacaggttttttttttcacatttataattttaatttctaattactcatgttaagttgctaagtggacaaaatgacaatagctatatcaattagagttttcctttattgttttgaatatttttagcttttgcatagcaataacataataaacatttgttgttttaaaaatattaacttttcatgggggtataatttacaatgcagtgcacacatattaagtgtgcacctccatcagcttgacaaatgcaggcaactgtgtagcctacactcctatccagaaacaatcccatatttctagaaagttccacatgaaccttctcatccgtccatgcccaagacacaaccactcttctgacatctacaccacagattagttttgcctgttctagaccctcataaacatggaagaataaatgtgtgttctgttttgtcctttttgtcagcgtaattgttctgagatcattcacgttgctaagtgtacattatttcaccctttttattgttgagtagcattatattatgtaagtgtgccatggtttgtttatccattctcctattgatgggcatttgagctgttccaagtcttggtgatggagggcatggacatctgtaaagcatgaaaacaaaacttgattcattcccctcttcaccttttttcctacctccaactgatggccaagtcctgtcattcttctgctattttttctcagatttgtttcctgtatcatcgctttatcccagctctctaggcagggcccacatcatctcttgactactctactgcatcaacactggtcaccctgtaggcttcctgcccctccctaatctactgtccacctggcaaccagagtgagcatctaagaacacaaattaggtcaagtcactctgttataaactgcttcccttaaagtaaaatcccaacttgtctttgatgtcccaggtatccagtcccctgccttcccctccagcctcatctcattccctttgctgctttttttcactgcctttcaactgcactagtcttctttcggctgctcaagcacactcagctcattaccagctcatgtgctgttccctggtctggaatgctgttcctttcattcttccctaaactggctcctccttgttcttcatgttttcatgttggggtggcattatctgaacactccttccaaagggaactcccatctcatgttttctctatcactgtgctccgttgagggtgacccttgcctctcagcacttagcacaatttgaagctcaatatttatttgtctactggtctgtagtcttctctctcaagagccccttggctccattagggtagagaacaggtctgtctcaccattagcattaccccatggatgcagcatgcagtagttgctcataagtatttcttgaatgaatcactgggttttatataaaatgttatcatatgaaattctattttactaaaatctcctttgctaaacagtcctgggaatgacaacggttgcaatccagtaggtaaaatcctgcccagcaagaggtgctgacaaggccctttggacttgtgagggcaaatggaaaaggatgactttctgagatactgatttgtgtttttatttttcctgattcacaaaggaagccagactttttctcacctgtttcagcacaaagtgcatctttcttgcacgcttgagtttgtggatgaagattcatacccactacccatacttcatcctgataggtagataagttaaatcaaatgcaatttctgcttactaaacaccatcgtcaaatcttgaaacagctcactggatttatgagtattgttttaatttattctgtgctattttaactacttcaaagataacagttctgtattcatttatgaaagtaagtttgcctcatcatatttttaaagttttaatttctcttagcgacactacaaaaccagccactgatatttaattcattccatatttgttgcggggcataagtgatgcttttagagtcattagtgaactcacaaatagatgcctgtggggtagcaaatgataagtcattagccactgtctgcaggggaaattattcctagggctgaagataagctattttgggagcaacattaaatcttcaattaacaggaaagcatttcataatttgtaattcacattggcataatttacatgatttgtaaattactaaatggttccctagtgtacatgtatttatgcatccattcatggtataatcttacctgattcctcaacatttaaaaatcgtagcttcatgtttgagaaggcctgtctttatttccaacagaatgcaaattactcacagacaggatgtctgtaccttagcaaatgttagcagtagaagaatgcattttaacaccctcattctctctctcttttttttattattatactttaagttctggggcatatgtgcagaatgtgcagttttgttacataggtatacatgtgccatggtggtttgctgcatccgtcaacctgtcatctaggttttaagccccacatgcgttaggtatttgtcctaatgctctccctccctgtgacccccaccctctgacagccctcggtgtgtgatgtttccctcccagtgtctgtgaacaccctcattctctagtggcccagaatttgatagtgaccaaacaaggattcaaaccctgtctttgaatccagtctggcggttctacaaacttaagttgagatcgaaagaagaaacactagaggacaaagaggacaaagctctctgatggagagctgggcgcatcttgaaaacgttaggaaactattaataaacagtggcttttggctcttactgcatttttccagagtgttttagaaaattagaaattagaaagccatgggttttctcattaaagggtagaatgttgttgaagaaaatggaggatttaaataacttttgtttgcttagaatattaacataattaatctattttagtccgatgagatatttgcaaatacatttgttttatgagtgtcaaaggctctaatatattaatattactaatatattagtacaaaatactaatataatactaatatactacaatgtattatgtctattatatataatacatcagtatattagttatattaatatattactaatgcattaataaagaaaaaagatgttaaactagacaggatccatcgtgtccttgtggcattttgatggaggccttcacctcaacagtgagttaagcctagagtatgaggatgagttctgtgcattagccactttaaagtttgtttgtcgttactcagtatacaacagagaaaacctcaaaatccctcttcacttctcttccaactctgcttttcccagtgtgagtagaatcaaaccatatgtactgttcagggatctcctttcttttcaattcaaccatgtgttttgggtgctcttgttctgactcatgaatctgagaactcttcccacctcaatcattagagaggcagaggattgtagttgtgaaaagtttgtacattggagtctggctttgagtcccagttttcccgtggacaggtcatgtgaccttggcaaaataaccacctcccatgcctcaggtgcctcatctgtgaaatggggataataataacacctacttcaaataaaacaatgcaaggaatgccctagaacaaacgcctggcacatagtaagttctacccaagtatttattattataataattgtataaacatttaacgacttccttaaattgtttcctattacttgctattttgaatagtgtttcaattaatatccttgtgatatggttttgctgtgtccccaaccaaatcttatcttgagctgtaattcccacagttcccatgtatcgtgggagaaacctagtgggaggtgatagaattatgggggcgggtctttcctgtgctgttcttgtgatagtgaatgagtctcatgagatctgatggctttaaaaatggaagtttctccacacaagctgtctctttgcctgctgccatccatgtaagctgtgacttgttcctcctggccttctgccatgattgtgaggcctccccagccatgtggaactgtaagtctaataaaactttcttttgtcaaatgccagtcttgggtatgtctttatcagcagtgtgaaaatggactaatacacctcatatgtataattttgtatatatgtgaatcgttttctaggacaactttctagaagtaaaatttcggaagcaaatcctttgcctttggtagctacaactgcactgccttttaaaggtctttaactatttataattttaccagccgtttaagggagaacatgttatctggatcctctctgatttttaaaatctattctttttctatctggtggacaggaaatggcatctcatcctcacgtgatttgacggattaacattttcatcatgaaggtgggtgaaaacacaggtggactttgatcaagtttgccattagcaatctgggcagctgaatcaaaggcttagcatgttggctaatgcagaatgtaataaaacggcatttagaggggatcagcacaacgtctcataaggtaggttccaatgctcagcaggccaagttcgagaaggggtggtagcctaacagcagtgtgcatggaactaacttggggggttccaactacagcaagaatgggatcgttttcctaaattagctcatataagcgtgtgctgcccaagacaagggaagtcctggatcacattgtgagttttgaggaaaggtcagctctctcttgctgagggtctggagcaaggctagacatatttttgggcatattgtagagatattttagacatatctccttttctaatgaacatctacggtggattctggaatagtgggagattacttgaatgacaaaacttagaaattctgtgattgtccaagttctccaaggttaaggaggaggaaaaagcaccaaggcagatgagtgcttcctggagcaagcaacaatatttttcactgtaggagaataataattttttaaaaaaagtagttataataaataattatataaccattaccacaatcaatatatagaacagttccatccccctctaaatttccttgcttcccattatagacaatctgttccccccgttccaatccctggcaaccactgatgtgttttctgtccctttaatcttttccaaagtggaaaaataaatggaacaaggcaatatcctgtatggtctgttacttgtttcactcagcattggatacctgttgaccatgtggctatgtatcagtagctcattttcttgtattgcagaataatatcctatgtcacggagtaccacacagtttatttaaccatttatcccttgaagaacatgtgggttgtttagaattttggtgtttatgaataaagctgctataaacatttgcttatagtttctttgtgtgtgaatataagttttcattttgctaggacaaatactcaggagtgggttgcatagtaaatgtatgtttgaaaagaaatcatgtttttaaagcaccatatttttatttctgcatactctgtgattttactacagaagtaggttctaggtctgatgttttcacatataggtgttcacttttctctcccacagcaagtggtgaaagtactatgaatatcacagagttctttgaggttttaaagacaaaatttctctataagtacaggtagcaagtgtgcaggaatttccttggtaatatttctgctgaggaataacaagagagtaagtaaatttaccttttaaaaaatcacaactaaagtgtgaaggtcgattgcaaaactttcatgtaagaaggattttattgttcttctatgcttagcattccttctgctatgtggaatagtcctggagtaacttgacacacagaaagtaccatattttaaacagaagcaattcattgtagtggcttctgcgagcaatagaaacttgcagaacgtacaaggaattcaaacatctcaacagaaaaaagcccaccaagtttccacaaaaaactacaattagaactgccatatgatctggcaatcccatttctgggcatttatccaaagaaaaggaaatcagtatatcaaagagacacctccaaaccccatgttcattgcagcattattcacaatagctaagatatgaaatcaacctaggtgtccaacaacaaatgaatggataaagaaaatgtggtatatatacatactatggaatactattcagtggttaaaaaagaatcctgtcatttgaggcatcatggatggaactgaagtttatgttgagtgaaacaagccaggaacagttaaacactgcatgttctcacctacatgtggaagctaatacaagttgatcttacagaagtaaaacgcagaacagaggacactggagactaggaagggtaaagggaagggaaaggtaagaagagatacgttaaagaatacaaagttacagctagataggaggaatcatttctagtgttggatagctgtaggatgtctagagttaacactaatatattggacagtttcaaatagctataaggaggatattgaatgttcacaaggcaaataaataacagatgtttgagattatggatatgctaattacccttacctgatcactatgcattatatgtatcgaaacatcactatgtaccccatgaatatgtcaattaaaaaaatagtttcaccaagacccactaaatcaacagaattttgtggcaacattatgcagaccccactgttgagagtaaacactatttgatatgatatcaagttccatcagtttgcatcagatcatcagatgagagggccataagcgtcttctgttctcataattatgcagatttattgttttgaaacaaaatcaacttctctctaaaataagcaaggacactggggcaaccaactattctcagagaaggagtgtttttaatttttttcaggattcttaggaaaatcaaatatcaaataacatacaggaatgtagagttcaatgacaaaaaggaaatctcttgactgtatgaatagtttcatgaagtcacagcattggtttaatagcaaaaattttatttggaaagaaacttacatttggatttaaagaacagtgtttcaagtcaaattcatcaaattagcaatccactgtgatttttccaccttttaaaatgaagattcagcaatttttagaaagcatagcttgtggttaagaatgacatcattttgtccaaattaaaaataattaacgtttagggtataaaaagagtgtgccaaaatatctcaaagagcaatatgaagtgaaataataaaaggtatcataattgctagaccaagccagcctattcaaaataaaagcattatggagcactcagttgtggattggtcttaagtggccttcaaacaaatgcatgagaaagtctgaggactgagttgaaacatttctctaccttcttccgtaattttatttccactattaaatttttaatgaccagtaatttgtgacattaaattttaatttttattatatattttttcagttgtggatatttcaaacatttaatttttagcagtaacagagaaaaataatacacacacactagaaacctaattggttttgaatcttgagcaattgcttagaaatgttcatatgatgaaataaaatgctttgtattgcaaacttttatttaggaatgagagcttcttaattccgggtcgttggacaatatccaaagtcaaatggtagagacatatgaaagatggttagtaattaatcacgcctcaccggtgtgccaggaaagtaaactcaccaggagcctctctcagtgccttatcaaattactaaaacttgacttgctttcctggattagtaaagtgatacactgttgattctggaaattcgtaacttaagatgattcctctgcatagtattcagcaaaccataagatggtattttgataattttgagtttcatcaaaatacagattattatcctgcgtgagtccactgtaatcttagcacagagtctgcaaattggtggctccaggggctggtttctcagaaatgtggggcattcgggatcagctaacagaggaatgagttcttgatgactccatgtgtgtcaacaagcagtttacgacttctcctttaaaacagaaaacgaacaagagtgtagttttgaaaagtaaatttatttatttatttatttttacttaggcttatataattttctgttctgtaagagagatcttttagggcccagggaattattccataccttggggacccggggaaagactgcgtacctggccaagactgatgatcaaccaagtgggatgctttatttcctctttagttagaagtttcaggatcaaagtgagcctttgagctatttgtcattttccctctaaatatttttgtcacacacacacaatttgtatagtggcttcttcagaagcctgtggcaatccttcctggctgtgaaaacagatggcctcacacaatgtggtccaaaaccagcagcatcagcattctctgggtacttgttagaaatgcaaagtagcaaagtatcagcccccaagtagacctaatcaatcggaaactctgggaatgggcctagcaatttacattttgacatgctgaggattctgaggcatgctcatgggtaaaaacgattgatctgtataatgctaccttacaaataagtaacttcagcttaaaactctttttttttttttttttaaatcctggaaggattctgctcttgggcaacacggcaagccagaagtgtccaggaaattaacacctacaaaggcagcccttgttcaagatctaactatcccagctccctctccattgtgggggataattctaggagtgactttttcagtttcccttgcagaattagctccaatcaccaccttgatagctggtgtaatagccccgcttttgtaatctgccttcccttttctgtgttactttcctttccctgaaggtgttccctacacccccaaataagctacactcaaatccttgcatcagtaatacttcttgggggccccaaatgaagacactcacctactgcaagtgttcagtagaaatcaataaactgagtttccccttcattctaacccaagtaagaggtcatcattccatttgtgatcctactgaagagaggcagaaatatacccaagactgcaggggccatggttaagaatgggctttagagctaaattcttgcgatggaaactggccttccctctcggggactgtgtgagtttgggttcatcttttaaggtccccatgcctcagtttcctcataaaacaggcagaactatagtatatgtagcagggaatcgttatgaggatttaataagttaaacaagcaaagtggctaaaatagcatctgttatgtagtaagcattttataaatgttacctattatgattaatattgttttcctttttttcttgcaaatagttttaagtctccttcagttctattcattttttttttctctaaagagcttccccagcattcctccattttcttgaaactgtttatcatgcttgttttgtgtcaagccgtggggctctgtagagcatgaaacaagaataagattctattacttatccttcatttaatagtatacatttgccaattaagagctttacacaaattttcttattaagtcttttcaacaacttctggatatggataatgttaattcttgtccatgatacaattggagaaattgaggcttaaagagatgaagtcacttttcaagtgctacatagatgctaagtgataaagaagaaattcaaacccaggactcttgattgcaggcccccagctcttatcacagacactatacaaacaggaatactttgtgttaccctgtgttaatggttctcttattttgctgtgcatcagaataccctggaaggatgactaacatacagattgccaggctcagcacctgctgtgtctaagccaggatatctaggggcatttctagtaagttccaggtaatgctgatgctgctgatttagggacaacactttgagaaatatggctgtgtattatgggtctatttgaacattcgaggaaaataagtaggataaaagtgatttgggacaacagtctcattcttttgatatgattaatacatatgacacaaatatcttctttggtaatttttaaaaaaattagatataatagaaatttatttttctcttacacaatggacctagaggtaggccatgaagggtttggcatggtgccttcaatgtcagagatcagattctgttacataacatcttattgctctttactcagtatcttgttgctttaccatcttcagcatgctgcttccactgtatggttttagatggctgctggagtaccggacatcacatctgcattccagacaacaggaaggagaaagaactgaagggcacccttcttcattttaaatttattttatttttagttttgattaaaggacccacacataaacataaaatttactatctttaccatttttaaatgtacagttcagtagtgttacatatagtcacatcttgctgcaatgtccctccagaagatttctgtcatcttctttggaaaattttaagaaactattaccaaaaagtgtaccgagatatagttttaaggctgatgtaccaatgacaccacgtgaataaattctgtacattcacctgtaaagctcctcagcttttgggcttttttctccttattggctggttctaaataaattttatgaattcccaataaacggcttttgggaaatgccaggtcatcattgtaataaaaagtggtataaggggaaaacaactctcttaaagctagacctacttagacaactgttgtctttttttgggaacattcaatattcctccttcaaatttctccaaattttctcccaaatgaatttttaaaaattacatagcattggaatcttgtgccaaaaacaacagcattgaaatcttttgctttagcagtgaatccttatatcaatatatgttaagtaaaaccatctaatatataaaatgttgcagaaacagtaccattgaagtcaaagtgggaacagggagggacggagatctagaattccatcattttggcctctcctttaggtgaagacccctaggctgtaaagcaggttcaactactgccctctaataacagcaaaaatgtcctaatctcttaggttcttaaatacttgtatgacatcactgacagggactaatttaaaagatttaattattccccaattcacacatgtcttgatttatttttgataaagagtagcaaatgggtaccctaggattctatacaaataagccagtgtaatttgatggaataaacactgatttggatgttaagagattttcagctaaccctggctcttctgataactggctttgttacttggggaagtcagttaatctctcgtttgtagaatgatggggctaaactaactggtctcttagaaattgtttcttcaagacctaaccttctgtggttctccttaatgcctggatgcaatgaccttactactgatggaaagattatcttgggaaatgttggccaaaactaaaccttctccccacacatctgttctaatttcattttgatgggcagatagacaccttggctgagttccagttcaggtaattacattctgtcactgtgattttccttgcattgtcaattggctacagtattcttcatgatttctcttgactaacatgccttctgacaatgttgtctgaagctgtggcttcatttgggaaatttctgtgtgttttagaaaatgtaatgctgtcatcacaatgggccatagacatttcagtctttctaggtgttctgaaggggttggctcaaaaatacagggcaggctttcacgttggtctacttttagtagtgacatctttcagatttacctaaaataatggctaatatttgtctaaaaactttctagtggagaactgtactcatactaatggctagtaaaattaatggcttactgtgtgtattgcatgctcgctgaagtgttttctgtgtgtccactcagttactatgtcactcccattttgcagatgaggaaactgaggaatggatgggccacagttcatgcagcctttctaagcttcccatgggagacttgacaggttagttatgatgcatccatagaatgggccattaaaaagagtgaggtagatccatattcagtagatgtgacaaactccccaagatgtgtgtgtgcatatatgtgtgtgtgtatatatatatacacatacatatacagaaagagagagagagagtctcactctgtcttccaggctgaagtgcagtggcatgatcttggctcactgcaacttctgcctcctgggttcaagcgacttttgtgcctcagcctcctgagtagctgggactataggtgcaagttaccacgccctgctaatatttttgtatttttaatagagacagggtttcaccatgttggccaggctggtctcgaattcctgacctcaagtaatccacccacctcagcctccaaaagtcctgggattacaggcgtgacccactgtgcccagctcccaaaatgtataactaagtgagaagggaaggatgtagaatagggtgggtgttttgctattttcttgatgttgcttataaaaggctgtgtatattttgctggtatatgaatgcacatgcattttttttttttgagacagagttgcccaggctggatttcagctggcatgatttcaactctctgcaacctccaccccccgggttcaagcaattctcatgcctcagcctcccaagtagctgggactacaggcatgcgccaccacacctgactaatttttttttcctttttagtagagatggggtttcaccacgttggctaggctggttttgagctcctgactgcaggttatctgcctgcctcagcctcctaaagtgctgaaattacaggcgtgggccactgcacatttctttttctggtctggaagcaaacccaacacaatgttaatagcagttacctttgaggtaaaggtttattttatttaaaattatttttactttccttatgtttgagtgttttttaccatgtgtatattatgttacttacatttttaaagaaaaattgtcaacaaggttacctggatagtgaaattatgaatgatctttgctttcttatatgtttctgtttcaaaaacacagtaaatgttatttattttgtggaagatttctatcaataaaggaaaaccagagaatgtccaggctaatggtaggagatttagtttttgggttttctggctggctggtgctggttggggtgagtctaggctggctgctggtggtggggcagacccctgaggccctcagagtcatacacagaggaagagcttgggtcagactttggccttttctgcttgtttcatcaaaacagaaaccacaagctttatcacagcctcaaaatgcattttctctcttctttggggttaaaaacaaatttttcttcaaagaaagcatattgagatttttaagtcaagttcacaattaaaaaaaaattttcttgaaagatgtgtgtattgtcttaacatgggttccctttgttaacacctcccagtggatttatttggcatgagggatctaggggcaggaccctggacttcttcttagacaacctaacctctttggtccagaactatctcaaggttctgctaccaacatgttagaagcaaaaggcccaggaaacaacccagtcacttcatgggaattggcagctttaaatgtgagtacacacacagcagttggttatctctttgggggttaagttaccccatttagtgccgacttgtgcagacaatggggcagaggccagagacaccagagtaatccttttacctgcctgatctggagtgacattggaatgaaggggcactttcagagggtatcagtttcctaggtaagttctgcaaacaagcccgcagagcctcagcttcctcattgtgcgtccactgcaggctgaaaaaagccagacctgcttgtcagtcccgcaaacagatgaaagacctacttgggttcggtggaattccattgtcgtggtatttactcacagtcgcctagcgcctcccctgaaatgtggactgcaaggggactagttttcatgccaagcaccacatcctgaaagcataaacagcgattaaaacttattataaaaagagttggaagggcagccagggttttccgtctctcttggtgaataaactcaactcctacatgccaacaccttgtggttacccaatactctctctgtcctgtcatttttctttcaaagaagccacaccttccatttctcactgcaaagagctgtggtgacagacatgtaagaattttattttctttttaaagtaacttagattacagtagggctgccatgagaaaggtgacacagaagagcagacgagagggagcagaaaggtgtatgcagattctcttgtgtccatcagccttaagaacaggggctgctgagccaagtcagaggctgaagccactcctagggataagatccccccatgtctctactctggggacattagctccactgtttagactagcttctcactttcacccacatttttaggccagtggaaacttccataaatccaggtcatacattcacattcaaccgatgtgtgtttacccactacttccgatctgaaattttgggaagctggagaacggacagggacacttgcccacagctctgcaggccagaggtggtcccattctgggactttctgtccttctctccagctgaacaaacctgatgatgctggcctcctctcatagaccttttaaatgctgcatgaagtccaaaccacttagcagaattctggtccccaccttcacttccaacctcctggatgccctcttgccctctactctttgttctggtcatgaaatagaaaatataatcctgcacccggtctttacctgggcagggcccctgtcctggaatgcctcccttttcctgctttatctaactcgcctctgttcagtgaagacccaacttaaatgccgtcttgtctgggaaatcttacttcaatcctctaggaaatattaattgcttctccctttagagcagattatcagtgatattatttgtttgtatgatcatctccccaaaaagcttcttaagggtttcaggaaagcattttgctcatttccatatcttcagttcctagcaatatacttggtaatcaatatgtgtttgttgaagtttgtatgagatcatcaatatttctcatgcagagaacagagaaaagagaacaacaataaaatatcttcaatgctgggctatcctgaaacagagatttttttgtttgctacatttttttttttttgagacagggtcttgctttgccacccaggctggagtgcagtgtcgtgatcacagctcactgcaggctctacctcctgggctcaggtgatcctcccacctcagcctcctggctagctgggactatagacatgtgccactatgcttagctaattttttgtatttttttgttgagacaaggttttaccatgttgcccaggctgttcttgagctgggctcaagtcatccacctggcttggcctcccaaagtgtggggattacagcatgagtttctgggcctggcctctttgctacactttgtcagggtcttttgcaggaattccttgtggtcgttggcaggtgtcatgccttatcactggtaggcaagccttggaaagctcctgtgaagattgtcctattagtatcagtttacttttttgaaaaaatatttttattgattttggagacagaatcttgctttgtcacccaaattggagtgcagtggcatgatcataactcactgtagtctcaaactcctcgattcaagtgatcctcctgcctcagcctcccaaagtgctggcattacaggcatgagccaccatgcctggccttagtttacttaaaaaaaatctaaaagttttaaaaaaactttacataaaaatggaaatagctgtattatttatttttgatttataatatatacatattggctatgaaaaattcaaatgaccaaaaaactaaaagataaaatgaaaacctaaaagcaaaatttaccctaaatgctaccacacagataacacagttatcctgtggtaaatatccttctagatatatctcatgcatatgcatacacacataaacacataaacatgctcagtttcatatattcatctattctgaaaacaccttaaacattgcctaagtgactcacattttacctgctcttatgtagcctcctttgtatctcaacgtattggacaccttcataacaatatacaatacttggcgtcttctattctaatgggtgtagagtattcacctgaatgaatgttcccaatgtttttcaaatgtctgctgctggatctagatgttattcccggattttcagtactataaaccctcgccgtgattgacattctttttcagtgaagtcacatttcatgggggtttcaggaaaggcgatatgtccagtaaagttttcaaggagtcaatatcaccatgcaaaattagtttggtgccactttggagaaagacgtggcctctccaattagtccagcatagccagtcttttctcctgtattggataagacagttgtttcctgaagcaagcacttgttgaaatagctggcttgcattttggcgggggtcatgtgctgtgtgaaaaatgaacaatacatttacctttaaatacagggccaagcccaatacggtgagatactcttattcatttgaggcctttctagacgacaagagaccagagaagagagaagcaggcccctgtgcccctcctgacatgtccctactgtgtgaaagggctgggctgggggacagaatcaccagggaatttcaggttctctctctctttcttacttacagaaaccatagcatcccttttggcaatgctaaatgtgaatcttgttatacagctttccagaaatgggtcagctggataaaagtgtaccaggtcaaaagtttaccaatttgtcatcctcataaaaatgcatagaagcgcctatttcttccaaatggtatgcttgattgaatctacctttgccagtctgacaggtccatatgtatcacttttatttttctttgtatttccttggtagcttcattatagtgaaaatatatctaagctcattggctctttctggttatttgtgaaaggtctatgtttcttgcccatgtcttttgttgggtgttctttttctcttagtaacttaagagttatttgtgtattaggacgattaaatctttgttacatgcattgtaaatatttctctagttttgtagttcatcttaactttatttatggtgttgtcatatagtgtgaaagtttttggctgttagtagaaaaccatacagtttcctccctatatatcttaactcattttctaagagtgttagattttagtttgagtgttttccagcttttggaattaagatatgagaaagtttatgtcaagcatttttgactaatttatctaatattttaatgcccttaaacagtattgagaggtacaacatttaagaggtgattaagtcatgagggttagttatcagaggaggaagttcccgataagaggatgagttcagcccccaccctctctgtctaatgcacatgtgcttcctcaccatgtgatgctattatcaattagtaatgatcatcctgctttaaaacatttagaggccaggcgtggtggctcacgcctgtaaccccagcactttgggaggccgaggcaggcagatcacgaggtcaggagatcgagaccatcctggctaacatggtgaaaccccgtctctactaaaaatacaaaaaattagccaggtgtagtggtggccacctgtagtcccagctactcgggaggctgaggcaggagaatggcatgaaccccagaggcggagtttgcagtgagccgagatagcaccatggcactccagcctgggcaacagagtgagactccatcttaaaaaaaaaaaaaaaagcatttggaatgaacagagattctatgatcaaattctgaggactaaattagtttagttgtgcctcattttagtgaaactctcacataaacatttctgtaggtagcaaacagaaattagaagctaagcattgcaatttaaagaattataggaacttaggaatcataacaattttctttaaatatcaggttatttcccttaaataagttatgtgcaagcacttcgtaaattctaaggtcttaatcaaaattttgattttattactattattattgggctatgtgaaaaagagaagtgaaatactaagcccatgaaaaaataagattttatttaacataatttaagacacagagcacttgttcagactcaagtctgttacattcttacatagagtaactcacattattgttggaaccagagctacagttcgtatctttcttgagccttcctcagggtccagagttctgagagaatttcattatcaccatctcccaagaaaaacaagcttcaggggggcacaatgtggcctttccgaagggctttcagtccattcttgaactccacctttcagcatgtgttgtctcttctttgtagaatgagaagaaaaatcataccatcacacagtacatgagacagtgcaggagtgcattcaaactgcacagataactcaacttaaaaaaatcaaggtcatgagatcccatccttgcatttctttgctgttcatcatttctgtatgcgtattagctggaagtgacaccgcacacactgtgcgcctgcaccacagggaagggattccccacgttcacacacagctggcagagtttcctcactggcaggtgctgggagggccaaggagccctcattccctttcttcctgcctctcctcgttgctctcttcctaccccaaataccatcatagtacaacgcagtagacacaacagtggcaactgacctcaaaagtcacacaaggcattgcttctccgccatggtgtttgggacaagtcgctgatattctgtgggcttggatattttattttctctcggaggtgacaagttctgacagtggaggaagtgtgactggttaatttttgttaggctccagcaagagagagtaaaagagggaattttccagaaaaaaggaaatgggtctacatgcacttaaaaaaatgtagttttggtctgacctaaagggcatgagtgtttttttttagagattaaaatctctgcttaatttctgcgctcctttgaaatgtgatccaaaatacatgctgtaccgggatgggatgtattttagccccatggttaactcagacacaacagaacaaaacctgccaccctgccacctggttcccttcttctgctgatggcatggagttgtctggcttctaagggctgttgtggcaacacctctgactccttcctgctctctggtggttggcctctaagccctgtgggatctgagtccactctctgcacaagctctgcactggggtgccccccacaggacctcactgtgggctacattgcccaacaccttggtacctcttgtctggactgttataatagcctcctggtctctatgctttattcctaatatccatctgtcttggtctcttttgtattgctagagcagaataccacaggtggggtaatttatagagaaaagagatttatttggctcatggttctggaggctgcatctggtgagagtttccttgctgcctcatactgtgggggaaggcatcccgtggtgaggaagcacacttgcatgagccagagcgggtgggggctgagctcatccttctgtcaggaacctactcctccgatactaaccctcgtgaccgaaccgcctcctaaatgccccacctctcaatactgttacaatggcaatgaaattttaacatgaattttggaggggccattcaaaccatagcactatcgtttcacactcttgccagacaaaagtcctgaaatcagagctctgatgacatcattcctgggctcaaaaatgctccatggctttacaaattctacttataatgttcttggcctggaagtcaaggcctcacatatcttacttcaatccactatttctggcaggacacctcaccacacttcccttgctcctgtccacatgagctcttaggccaggggcatgcttctctgtttgaccacatgcacctcctctcctgttatttctgccatttgagatgctccccttcctactgctgcattaactgaaagccacacttcatgatccagaagagatgccacctcctctgccaagctggccctgactttccaggcagaaatgatgtattaccatatggcattcattgctttacagtgaattaaagctattatttttagttgtaaaaatacattttttaaaactacaagtgtaaaatacatttgtgttgcaaaagtccagataatacaggaaaataaaagcttcccgttccctcagctctcttctaattttaattcttggagctattactaagagtgggggccgggcgtggtggctcatgcctgtaattccagcactttgggaggccaaggcgggcggatcatgaggtcaggggatcaagaccatcttggctaacatggtgaaaccccatctctactaaaaatacaaaaaattagccgagcatggtggtatgagggaggctgaggcaggagaatctcttggacccgggaggcagaggttgcagtgagccgagattgcaccactgcactccagcctgggcgacagagtgagaatccgtctcaaaaaacaaacaaacaaacaaaaaaaattgtgtggtgtgtgtattttcatttgttaaaacaatgtaaatccaggtacaagcacacagatagacgtatctaaaataaatattggggctggcatggtggcttacatctgtaatcccagcactttgggaggccgaggtgggaggatcacttgagccctggagttccagaccagcctgagcaatgtggcgagtctctgtctctaaagatgaattaataacaataaaaaattgggccatcctgtaagatttttctgccttttttgactcaatatatcaagaacatttttccctatcagtatataaaaatacactctactacttttaatgacagtgtaatattctatagaatataggtgtcataattttctatttttctataaattaatattttatgtatttcccattgttctgctattacaaatagttgttcagtaagcattcttgtacatttatctttgtgcaattgaagaccaatatttctctcacttatgtagtgccacccttgctagtaggaatgttccgttaaatgcaaaacctgcagaacttggactcttcaacatgtttctactttgccaaaactgtctacgcctccctgtgcttgcttgctgctccttggctcttctttgtctttaatgttgcccttaactctaataaaagcctctgtcttagtttaggtttccccagaaacacatttaagacaaggatttgaatgcaagtggcttattcaagaggtggcctcaagatgcacaggtaggggagtggagggtggggcggaacagggaaggcagacagcaccctgtgctttaatgagcaggtgatcactgtgggcacttggagcacagtcacacggaggctgggtacaacatactgcagagtggtctcaattgaggggcaaggaagatgggggtatttattatccagttcccatccgtcatcaattgagggtgctcttggaggcgtaagcccctggaacactcaatctaccctagagctccatggccagagaaagccctcaggcagaaggtcacttgggctttcagccagaatcaggctgcatgttcaggattggtgggtgcttgggggaccaggggggccaccaaaggcatagcctatttccctgaacagtcaaaatcagagactcctagacaaagaacagatcacagaggtcagtcatcaaatcaagatctcataaaagatgctagtccatatctagaaaaatatcttccagagagattgcctggatgaagaaataataataataattaataacaaataataataataacaaataataataataatttatactaatgtaataataacaccagaataaataagataaatacctttcagtctataaagctctttcatatatatattatattattcaaaaaactgaatttcacaagagccctgtaaggtacacatcctatattattccctttttccagatgagaacatcgaggtgcagagaattaactaataagtgtcagagtcagaactggtcaccagttcttgtgaatacaagatcagtgatctagagttaaaggatgattagaatttttctacccacgatggggtcggtttgcagttcaaatgttctcttcaccactcatggtaataaagccaaaccaagaacaggactttcaattctaagatttatttctagatgattttgagaagtgctgcaaaacaagaaaatgcaatatagtgcatttcaggacagccagataaattccctcttattgattacatttcaaatatttccaaaatcagcctcaatgctaaaacaagcaagaagatgatgtcttttagccaagaaattggcataattagaaatatggaggtataaaaattaagattaataacgtaaaaaacaagaagcatgcacttctaaaagttctatcttaaatatttgacatcaaatttttacaatgaaacgtagagtcttaaaagaaagaacagactgaatattatcacactgtggtggcttatatctatatccttgatataagggtataaaaatctttatatctatccaagatttttagcagaaaggaaagatctctgggagcacaggtagagaggccccactggagtacaaggaggggtgcagatggtgtggtaaggaggctgatggtcctattcaggatgaattaaggttagtttgcatgctgtttaaaatctcagtcctccgagatgtttccccaaaattcagggttctcttcctgcaagtttctatatgcttttcagaagttctttccccctgtaatttctattaagaagcccaagtattccagtgacgattttaagctccatgattttcattattcctgatactatttttgcccttttattcaatccatgttagtccaatttgggaatttcagcatggagctatcttagcccttgttgtctgggaagcttatgtcagactataaatagcccactcagccaaggatttgtgtctttgaaagtgtataaacatctcctaaatgcaaagtacaatttcaactttagtaaacatcagggtcacttggagggctggctaagacacagatagctggatgtcacccagggattctggttagcactagagtgaaatccaagaatttgcatatctaacaacttcccaggagataaccgatgctgctggtctgcagaatacactttggataccactgatgttgttggggcacagattatattgagacttcccatttgataaaagggggctactctttagcactaaagaaattttcatgactggccataaaacagattaagttcaggagatggtggaggaagcagaagtctgtccagcagatgtgtgcccttatatgcatattctgtctagtgatttagatccttagtacacatactcccctggaccaatattcctcaaggcaagaggctggtagtaatggagagatcaccaaaattctctggtgatgctctggattcaagtcttggttatgtgccttctcccttttttctgctgtgtgaccttaagcaagtcacctaactcctcttagccttagtgtcctccctggtcaagtgctgacaacataatctgtcctgatccatgcccatgttgcagcgattgtctaaatagaaatgagctgacactcactttgcatactgtgaagccctctctaggtgtaaggaattaactgggagcagcttgttcctgaagaggagatgggggtgctgccgcctgaatccaggctcagccccacataccgcctgcctggaggatcaccatatggagcctcaccttgttccctttcaagatgaacttgcattccctagaaaaaatttctcagccttaaagtcacaacttcaaaaatgtagtggggaccacatttaagagatctggtgaatttttggtggattcaattttttaaactgcacttttaaaacaaacccaactatagagatgaaagccaagaattaaaatatccatacagaatagaaaacattaatattttcaagtacaatgaattgaataaccatcataaggaaacaataaaacatgaagtgactgagaccagatgatcaccactgggcacacgtggtctctgtagcaggctcagggagcccagggttggctttcagtttcctgcaacacagagcagtcccttcagcactctgccaataaggatcccatcggttaatgagacgagcttcaactaactggcggaggctcggagggtggggcacccacgttacattttctccttgcccacaactctttgaattttagtctggttgtcaattgttctagcatctcttccccctagtgtgctgtttctcccctcataaaaacagctacagagctgaggtctgaaatatctggagtatataaagatggtgaggattggaggggttcatggtgctctctcagcccttgcttatgaacccagcctctctcttctcaacccccacctctgtccccagaagttctcagtagcttcaataacaaaggcagattttccacctgttaacctggaagaatctgcaaagaagcatgagtgtaaacggacttagaagaagtggaattcaagagtaatgtttctgtcacgatgcctccctcacaccccatgtcactgaccataggcacccagagtgctgcagggttcaggacagaagctcaaatctcagaagccaactagacatctgtggatttgaaggcagggataatgaggacaccactcggtcagttcttcctacaaacagtagttggtggaaacctaccttttatagggatgtcttcccacctatttatctagatgagaaagcttttagaataaaagtaagattttcttttataaaacaaattttaaaaactctttgttcacaactttcttcttctcatagttaaatcatggccattggaagcactacggtgtttcttacttctctgatttgcactttattaatagggaaagagattgccttggtctgggttccctcagaaactgaccctgagatgagggtttgggaggaaaaagtacatttgggaggagtgtggcaggcagagtggggaaggcagcctgtacagggcacatgcttgtgtcaccaagttgggggtgactagtgcttgttcctcagggagaccttgggaaatggtataaaatacgtaaccacggaattatcccctagaggaggattgaggatccccctggaggaggattgagcgggagtgtctatctgggcagctgcaactaccagggaagtgagttggagcacactaaggtgaaaatggatggggtggagagggcaggggaagggtcactcattgcattaactgcagaagcaaaccctctcgatgctcgctttctagtgaaaatacatacgcaggtttatgcttaaggaaagacagagctcagatattcatccccattcaactcataagtaaaaatcctgttccctccatctaacatatcaaaaagcctgcttctgcgccttatttgctgttgttaacaagcccctccccagaggatggagcctctgtttctccttcctgcttcaaaaacgttgaggctgccaggccagatcccagaccccagcttcatcccattgcaagctctcaccttgatgcagtttgtaggattttgctgcgtgaggtgagtactgctgtttatccaaagcaaacctgctgaattggattgaagggtaggagctggtgtttctgtaagtgagctgcaccatttgcttgtgaaagtacgtgagaatgatgatgttggacagggcagcagggaccatagaaagcctcagcccaatgcctttgtttacagatgaggagattgaacaccaaagacctaacatgacttgtgtagcggttcctgactagttagtggtagatctgggtttaaaatttagcccatcttttccagtgctcaaaccactttggacaggtcatgtaaaacatcgtctgattcatggctgtgagaaagatacaagctgcctataggcaggaagatggtataattccccaaataccaggccattggtgggggaaaatgagaatttttcatggcagaacttccaggagctagtgctgtgccccatggcattaccagaaggcagggctggatgcaacacagcaattcactcattcattgttttgactgcaaaagtgaattggctgaacatagcacagtaattaaaaaaaaaccaaaaccaaccagtactcacagtagcatggatgtatggattatgtttaggaaaagaaatcagacacgaataaggatgtactgtataaagccctccctccatagaaagttcaggaaccggcaacactaatctatggtgatagacctcaaaatgtggttatttctgggtggaagttggcattgactaacaaaggccagatgggaacctaagcgggtgatgaaaaagtttgctattttgatctgggtggggatatgcaggtgtttgcatggacggaagccagtgagcttgcatctaagactgggcactttatgttccttatgaaatctctcagttaagaagatgaagaaaaaatcaaagcaatgcacataacagatcataacctggaaaggaaattggagtaaaatcagtggcttttctcattcagtcatttattcccttaacaaatgtctgccgaggctgttggtgccagcccgcactcccccagcactcatcccttctgcacacgcggacagtgtcccgggggagagcgccctccaccctctgctctagggcttcctctccggctgtgcaaggcaggctgcacgcttgggagccatgtactgcaggaggaaccttctggtaatgataggatagggttggaggataagtaccccggcctcctcattccccagtgggacgactctgcggcatgtctgcgctggctcccagggaacagcaccccagatgcccacactaataacctggtctctcactcatcctgactgggctgccttcccttccctgtctctcttcccctttcttctccctctcctcctgggatcacctcccatacaaactcctcaccctcatttccttgtcccaagttctacttttcagggaacccaggatactttcctcctggtcctaagaaaacccaggcaaaccaagtttcctgctctcatacaatttacagcatgttgggttgaacaggcaacttaacaaacattaaaaacgaagtgtaacgagtgctgaggtcagggagcatagactggcggaaggcacagagccacaggggaccctaagctagcccaggagaggtcccagaagctgagctgggagtgactggggctccctgccttttcttccccttcttgaacttccactcctctctgtttcatttcttctcttcctttcagaaatgaaagagacatttatttatttaggacatttccttatgatcccataaatatcagtaggtattatattgaattcgccgcccatgatggtttattgtgatgcctaatttcatatcacagaactgagactcagctttcaaaagtggctccggatgtatgggaaccattttcaatattttcagtattgctgcccatctgcatgacatatattttctaggaaaacccagcacatatttcttagaccgtgggggttaaatgcctttcagggtagctgaaaactacttaccaatcagcagctggcagaaatgtgtaccaagagctctcatctggaagtgggcagctgactcatgttggagttgtcatccctactccagcagccttctgggtgaaaagttcttcaaagcacatgcatgtgaggccagaccatttctcttctgttttctatgctcctcaccaaaaaagaatgagtcatggagctctctaattcaggatccagtagagcatcagacagaatgcaggctgttgtttgaacatccgtctccagatagactgcagtgtcatttaaacaaagatgtatgcatttgaatatggtgccatacaattcttgtgccgaactggcatatcttctgagggaagattttatagaaatagaaccactcctgtcagctggccattttaaatattttttagcctactctagttggtatcagttagttttatacagatgttatccttcactttatattataaacctagaaaataatgttaaaaatggcacaatatcaccatatacatccaaagaccaaaggactctgttaaacaaaaagggaaacttcatggtgaggtttgtatataaagctaaactcaataaacactagattttttttttttttttttttttttgagatagggtctcactatgccacccaggctggagtggagtggtgtgatccagcaatctccgcctcctgggctcaagcaatcctcccaccgcagtttcccaagtagctgggatcacaggcatgtgcccccatgcctggttaatttttgtgtttgtttagagatggggtttcaccatgttgctcaggcttgtctcaaactcctggactcaagtgatcctccttcctcggcctcccaaagtgctgggaatacaggcatgagccattgtgcccagcctagacactggatttttaaaatcagtggctttttcacttgtttaggaaaaaaagatgatgtaagagagaaacatgaacatgttttttattttaaccacttatccttgatgaaaaataaaagacttgtttagtcttctattgctgcataacacactactataaacatagaggctcaaaacaacttccatatattagctcacagttttgtaggtcagacttccaggtatggggtggctgggttctctgcttaggttctcacaagtctgaagtcaagaggatggcaggttttgtttctctctggggactctgagaagaaccttcttccaagctcattcaggtgttggctgaagtcaattccttgcagttacaggacagaggtccttagctcctagctggctgtcagccaggggatcagtcagttcttagatatcacccacatttctcaccacatggacgcctctgtttttaagctaaccacaatctccttcacatggtagccctttcaaacttcaaatatcttctaccaagaaaagcccaatccctttaaagggctcatttgattaggtcaggctcttagaggataatctccctatcttaaaatcaattgatttggggccttaactacatttgcaaaattccttcacagcggcacctatattggtgtttgctgaataacagggagggcgtgtgtgaacaccagaggctttaatcttgagggccatcttagaattctgcctgtgacaggattatttagtaaatattgatttaccctcttcatagaaaatttataatcaataagggaggcagatatggtgctttccttattgattacttacaaggtccagcaggcaatacaaagtagttaaatgggccatgtgtaagacaatatggtgaaacagaaggctcagtggcttcttgtaactagtcatactcaactaagttgatggctgctctgtgacaatatactctctatattgccaaatcttctcatttttaagagaagtaaaaattcttttgggttttttttttctttcttgaaataaggtctcactatgtcactcaggctggagtgcagtgacctcatcatagctgactgcagcctccaacttctgggctcaagtgatccttccacttcagtcttctttgttgctgggatggcaggcatgcaccaccatatacctaggtaaaattttaattatttttttgtagagatgggatagctctatgttgcccatgctggtcttgagctcctgaccacaagggatcctcccaccttggcctccgaaagcaataggattacagatgtataccactgtgcccagccctctcttgagttttaaaagttgtcagaagaattctgagaagatgatagagtaggaaataccagaaatccctctccccatctagacaataatagcattggcaatatctgtctgacatgattattttgggattctggagtctattgaatatttgcaacttctaggggaaggcttggatggtaaattgtttaattttgatcattttctgctcctagcacagtagctgctacctatctttcacctctggaccctcctctcttgagcaggcagcatgcatgtgttcctggagaagtttgcacacagcttgttggaggcagggtgggcaaaaggatcctgccctccaaatatcagggatttgtactctgactgctgatggctgcttctgatcacaggggtgctggcaatgaaaaagccattattgttgttgcatcttcccacattattgcaagcccgtctacctctggatgagctgagttccacggtatttaaaaagctggcacctttgttacccacttcagttttctatttcttctcctttgagagccagatatcaaagactaggactttcaaaagcaaccatatatattggggaaatgagaaagtcatcgtacatgctcagggacaggcacagactcagaaagccaatcttcaagattcttcctcaaccaggaatcctgtacttcttcacccaagaatcctgtatctggcaaaactgtactccaaaagtaagggagaaattaagactctcatagataaacaaaagctgagggaattatccccagacctgtcttgcaagagatgtccagtggaatcctgcaggttaaaatgaaagggagacagtaacttgaagccacaggaagaaataaaaatctcagtaaaagtagataaatagacaattataaaagctaatattgctgtaacaatgatatgtaacttcattttttgttttctatataatttaaaagattagtatattagaaattattagactaaaagctaagattattgctactttggttcataactctgcattttgtcttctgcataatttaagagactaatgcattaaaaattgttagttaatatatttggacacacagcatataaagatgtaattttgtgataacagctgaaggggtaggggttggagctggagatggagcagagcttttgtatgttattgaagttaatctggtataattcaaattacagccttatatcttaagaatgttaaatattatcctcaatggcaatcacaaagaaaatagctgaagaatatccacaaaagaaactaagaaacaaatgtaaacatttcactacaaaaaacaactaaacacaaaagaagacagtaaagcaggaaatgagggacaaaaaggcatatagaaaacaaatagccaaatgacagaagtaattgcctccttatcagtaattattttaaatgtaaatgtttaaatgtaaatggattaaactctctaattaaaagacagagattgggaaattggtagaatggttaaagaaaatcatgattcaactatacgttgtccttaagagactcaccttagatccaaagacacaaataggttaaaagtggaagaattaaaaagcaaatagtaaccaaaagatagcagaggtagcatactgatattagacaaaatagactttaaatcaaaaaagattacatgagataaagaagaacactacatattaacaaaaagtttaatacagcaagaaggtataacagttataaacatttaggcacctaataacagttcatcaaaatatgtaaaggaaaaattgacataattgaaggaatagacaattctacaataatacagacttcaataccccattctccataatagatagaacagccagacagaagatcaattaaaaaaagacatgaacaacacaatcaaccaactagatttaacgtacacatgcagaacacaattctaaaactgcagaatacacattcttcccaagtgaacatagaaaattttccaggacaaaccacatgttaggccacaaagcaggtctcaatggatttaaaaaagataaatgtcagactaagtatctttttagatcacaatgggataaagttggacatcagcaacagaagttggacatcagtaacaaacacacaaatttgtggaaattaaatagcaccgtcttaaacaaccattggatcaaagaataaatcacaaagacattagaaaatacttagagatgaatgaaagtgaaaacccagcatatcaagatatatgtgataatactgaatgctatgctatggagaaaatatattgctataaatgtttacattataaaacaagaaatataccaaacaacctaactttacaactaaaggaactggaaaaagcagagcaaactaaatccaaagagagaagatgaaagtaaataacagattagaggagaaataaacaaaatagagaatggaataatattagaaaataccaataaaacagaaatttggttatttgagaaaatcaacatggatgacaaatgttttgctagatggaaaaaaagaaagaagactcaaattactaaaattagaaatgaaagtgggaatattactaccaattctgtggaaacaaaaaggattataagaaagtaatataagcaactgtacaccaacaaattggataactgaaatgaaatggacaatttctagaaatacacagtgtatcaaaactgaacaacaaagaaaataaaaaatttgaatagacctataactagtaagaaaatctcctgatatagagaagccctgggctccatggctttactggctaattctaccaaacattaaaatacaaattaatgccaatcatcccaaaaattttccaaaaaattgaagaggaatgaatgcttcttaacttattctataaagccattaccttaatactaaagccagacaaagacattacaaaaaagaccaatattccttataaacattgatgtgaaaactctcaagaaaatactagcaaattacatccaacagtattttaaaaagattattttctatgaccaaatgggacttacttctgcaacgcaaggatggttcaacatatgaaaatggttcaatgtaatatatcacattaacagtataaaggataaaaatgacatgatcatttcaattgctgaagaaaaagcatttgacaaaattcaatatgttttcatcataaaaacactcaacaagttagaaataaaatcacattacctcaacataataaaagctatatatgaaaaacttactgtgaacatcatcctcagttgtgaaaggttgaaagcttttcctctaaaattggtaaaataagaccaggatatctgttttcaccacttctattcaacattgtactggaagtccaagccagagcagttaggcaagaaacagaactaaaggcatcaaaattaaaaaggaagaagtaaagttatttctgttttcagattttatatgtcaaaaacactaagattccacaagcaaacttttagaactaataaatgaattcggcaaaaatatcaagatacaaagtcaacatatagaagacatttctatacactgacaacaattaggaaaggaaattaagaaatcaattcaatttataatagtatcaaatagaataaaatacttaagaattaacataaccaatgaggtgagagacttacacaaaagattgttgaaataaatcaatgaacatataaataaatggaaaaataccctgtgttcatagaattgaagacttaatattgttaagatgttaataccacccaaattgatgtacacatttaatgcaatctctaccaaaatcttaatgatttttttgtagctatagaaaaatctctcctaaaatttgtgtaatctcaaggaaccctgatagccaaaacaatcttgaaaaggaagaacaaagccagaggactcacaacatttcctgatttcaaaatttactacaaagcaacagtaaccagaacagtctggtactggtataaagacagatatatagacaatggaaaataataaaaagctcacacataaacactcacgtatgtggtcaagtgatttttgacaagggtgccaagaccatttagtggggaaaagaaattcttcaacaaacagtcctaggaaaactggatatccagatggaaaagagtgaagttggatccttaccctacactgcatacaaaaattaactcaaaatgaattcatgacctaaatgtaagacctaaaactataaagcttttagaagaaaacataaaggaaaagcatcacaacactggattttgcaatgatttcttggatatgacactaaaggcagaggcaacaaaggaaaaaaatagacaatttgaccttcatggaaatgaaaaattttgtgcatcaaaagacactatgtatatggtaaaaaaggcaacctaaagaataagagaaaatacttgcaaatcatatatctgataagggattaatatccagactacgtaaacaatgtctacaatttaacaagaaaaacaaacaacctgattaaaaaatggacaatgaacttgaacggacatttctccaaagaagatataaaaatggccgataagcacataaaaaagacgctcaacattactaatcatgaaggaaatgcaaatcaaaagtatgacgagatatcacctcacaccaatcagaatgggcactctaaaaaaagacagaaaatagcaagtattgataaggatgtagagaaattggaattcttgtgcattgctggtgggaatgtaaaatggtacagcccttgtggaaaacagtatagcagttcctcaaaaaattaaaaataatattaccatatgagccagcaattccaattctgagtacatattcaaaaaaattgaagtcagggtcttgaagaaatattttcattcccatattcacaatagcattattcacaatagcattattcacaatagtcaaaatatggaagcaacccaagtgtccatcaatggataaatggataagcaaaatgtggaatatgtgtacatacagtggaatattacatggccttaaaaaataagaaaattctgacatatgctacaacatagatgaaccttgaggacattctgctaagtgaaatatgcccatcacaaaaagacagatactatatgattttactttacttatatgaggtacttagggtagttaaaataataggaacagaaaacatggcgtttactaggggctggtggaaagagggaatggtgagttattgtttaacaggtatagagttctagtttcacaagatgaaaagagttctagggatggatgtggtggtggttgcaccacaatatgaatgtacttaatgccactgaattacacacttaaaaataactatgatagtacattttacgttatgtgtattttaccactatccaaaaattgcagaaaaagttgtcaatgacttcaaatttttaaaaatactgggtgaacctaataaaacacatttctgtctttttatttgctttttgtttgcttgtttttctttgttgagacaatcttgctctgttgcccaggctggagtgcagtgttgtgatcatagcatattgcagcctgaaactcctggactcaagctatccttcttgcatctgcctctgagtagccaggactactgaagtgcaccaccatgcccagctatttttttttttaatttttagtaaagatggggtctcactatgttgcccaggctggtcttgaactcctgagctcaagcagtcctaccacctcagcctcccaaagtgctggaattatagccatgagccactgcacctggcccacttttctggtttttcaggagacccaggtgtcaccagtttccttctttttgtggtcttaggtattcattcattctagtcagtccttagaaaatagttattgaacacctattgcatgcatattggttgtaggcactgggaatacaggctggtcactgaagcttcactgagaaggggacatttgagggtagatcttaacagatgaagaaggtaaacatgcatccttctgggcggcaagcatcccaggaagaaggcacataaatgcagtgaccctgaggtgatcattatcatgtgctaggcatattcacagagtgacacagaggcctgtgtggctagagtggattgggcagggggagcagtatgagaggaggtcggaggggtctatggagctagatcaccttgggccttatggggtaaggatttgagattcttttgaaggggaatggaaagcattgagatttaagcagaggagtgacatgaactcacttatcttttcaaatgaccactctgatttctcagacaaaattttgggaaatttagggtaaaaacaaggacatttcttaggaatctatagcagtaatccaggaaaaaaataatgtggtcttaaattggaaagtggtgggggtaagatatcagattcatgtgatcatgactaagcaactccaggattttctgacagaaagcatgtggcatgagggaaagagcagagtcaaggagggctctggaacttgggccagaaaaactagaaggataaataaataataaaaagtttagcagtcaaattcataacagtaaataaataaattaaaaataataaaaattaatggataaaaagttgttatgtaaattcagtgccctattccatctcctaggttattttcactagaagttaattagaactctccagttgtcccagcctagacagcctgctagccccttaactaagactgcttgccacttcctgcacctcctagtaggctcagtctagatactctttcaaaaaacacagttaagcacttagaaactgagtatttaagaagctcctgccttatctttcagattgcagctcaagcccaagaatctgattctaactttgtgcccagtctttttgccaatgggactcctgctctgggacacacagtacctacatgatgcctcaaagtctgtcttctttctatgcctgagacctgagacttgcctgcccccctagtcacttgtggcacaagctctgcctttccctgattcttggacttttagcctgtccttgactttcatcatagatatagggctatacagattttctttttcatctttgtcagttttggtgagttgcattttttgaggaattcatccgtttcaactaggttgtcaaattcgttagcataaaggtgttcatatttttcattcttttaatgaatgttgagtctgaagtggtaattcatttattatttcagatattgataatttacgttctcatttgtttttcatgatcagcctagctaatggtatacgtatgtcagttgtgttgagcttttcaaagacaactttcagctttgttaatttttctctgttgcttgtctgtccctgactcagccttggaaacactctcctaatgatagttgcttgcctgcttagctttctcagttgtccttcggattgacctgaggcagaagcgattgccatgttactgtgtttatattctctcagggccatctacctttctggtctggtgtcctcttgagatgaagtctggccttttcccacgaccttttattttattttatcttcattcagcaaacatttattgaatacctactatgtgcaggtcatgggaacatagcagatgaataaagtgacctcataggacttatattccagtgggaaactggacaatgaacaacagcgggccccaccctttgtggtaccagggactggtttcgtggaagacaacttttccacagatggatgggtggggtatggttttgggatgatccaagtgcattacatttattgtgcactttacttctattattattacactgtaatatatgataaaatagttatacaactgaccataatgtagaatcagtgggagccctaaacttcttttcctctaactagatggtcccatctgtgggtgatgggatacagtgacagatcttcaggcatcagattctcataaggagtatgcaacctagatcccttgcatgtggaattcacattagtgttcatgctcctatgagaatctaatgccaatgctgatctgatgggaggtggagctcaggcagtaatatgaataatgggtagtggctgtaaatgtagatgaagctttgcttgcttgcccaccactcacctcctgctctgtgacccagttcctaacaggtcacggactgttacaggtctgtggcctgggggttggggacccctgacaaacaagataagtaaatacagcatttggcaaatacatatttctctatatccatatatttcgtattttcagacctttcactcgaccctatgttggcttgttatgaaccagtacccagacagcatcttgcttttgctagattgtggtcttcttgaagataaggagtcaggggtaagttttcttccatgaaagagcttctctacaaagggaggagcccatggaggttcatcatagccttatcatttacccctactccattgtgtaggcctgggactgggggtgctgagtgagttatcctgcctcagatgtgaacttatgtggcactgctaaggcctggctggaacaatttaactagaattttatgataaaggccagggtaaaataaaaatatttgtaaattctatatttcctcagatttagggcaccattattgtatgatacagctcaatttttaagagctttaaattttgataactttttgtcctaataagattttaaacttccccataaccccttgacatcacgttctgatgctgaatcaggtgtcttccagccctgtctgggtctgcctcaccagtgctggacccccagtcccccactatggatgggtctgcttccaagacctgttcctcctcagctgcctcaaccttttgtagttatctgaaatgaagatttccccaaatttaagagcatcttcacctctgttgcttgcccgaagtggcaaatgtaatgaaattccttgagctggaaaaggtagatacccagtgtaacataagtttccagcattacagctcttgcattacctatggacaagccaagattatgattactgtgactattaaacttatcattattagtggtaagtcattccagcaaatctgctctaaaagctttgctgagcaacctacagtgtgaattgaattttatcaaatgatgttacttgtaatttttgcatcatttctctttcagtagaacttttcaacaaacattgtctatttttctataagagaatggttctggtagagcctgagatgtacccaaatttggcagtaatttacttgcaagttaaatttataatacgtttaaacatttatattctttaacattaaatagcaggacttaaaagcattttttaaaaagtttattactatacagtatatctagtttgacctgaagtggaaattatgcctggttgtttcaccaaggaaaacatttcaatttggttcttccatttcagaagaaaaggtctaaaattagtgtcagtttatatttctgctttatcagaaaatatttcaagtggaaattttcatcatggataagaatgatgacatatagattaaaatgttatgaatatatttataacttttatagcaaataaaataataatgcattcagattttgacatggatgctaaacaaacaatgaaaggtttgtgtctgagagaatcagtattaataattatttagtattaagtaagcattgttaagtaattaagtactaagaattgagtacaatattttaaaatgtgactttacagagagagagagtacaaattgtataaaattcaagaacacataaaaccaatctatactgatgggcatcagaatagtggctatcttttgggaggtgctgactaggcacacaagatgccttcttgggggttgtacatggcctgcatcttgacttggtggtgattgattacagggttgtgaacatatgtaaaaacttcatcaaggtgtacatttcagatgtgtgtgcctgactgcacatacatcgtagctctataaaataagtataagtacactcccctaccacctcatgatttatgaatgtctttcacaagatctacaggcttccctattacaactgaccctcaggtagatcctgcaagatggctgaataggaacagctctggtctgcagttccgagtgtgatcgatgcaggagatgggtgatttctgcatttccaactgaggtacctggttcatctcactgggactggttgaacagtggctgcagcccacagagggtgagccaaagcagggtggggcatcacctcacccgggaaaagcaaagggtcagaggatttccctttcctagccaagggaagacgtgacagactgtactgggaaaatcaggacactgccacccaaatactgtgcttttccaaaggtcttagcaaatggcacaccaggagattatatcccgcacatggctcagcaggtcccatgccctcagagcattggttactgctagcacagcagtctgagattaaactgccaggtggcagcctggctgggggaaggggcgtctgccattgctgaggcttgagtaggtaaacaaagcggccaggaagtttgaactgggtggagcccaccacagctcaacaaggctggcctgtctctgcagagtccacctctgggggcagggcatagctgaataaaaggaagcagaaacttctgcagacttaaacgtccctgtctgacagctctgaagagagcagtggttctcacagcatggtatttgagctctgagaatggacagactgcctcctcaagtgggtgcctgactcctgtgtagcctaactgggagacacctcccagtaggggctgactgacacctcataaggctggctgcccctgcagaaatattgttgttctgcaatttttgctgttctgcagcctctgctggtgatacttaggcaaacagggtctggagtggacctccagcaaactccaacagacctgcagctgaaggacctgactgttagaaggaaaactaacaaacagaaaggaatagcatcaatatcaacaaaaaggacaaatccacaccaaaaccccaagtgtaggtcaccagcatcaaagagcaaaggtagataaagccacaaaggtggggagaaaccagagcagaaacctgaaaattataaaaaccagagtgccccttctcctccaaaggatcacagctcctcgccagcaatggaacaaagctagacggagaatgactttgatgagttgacagaagtaggcttcagaaggtcggtaataacaaaattctcccagctaaaggaggatgtttgaacccattataaggaagcaaaaaaccttgaaaaaagatgacacgaatagctaaccagaatagacagtgtagagaagaccttaaatgacctcatggagctgaaaaccatggcacaagaactatgtgatgcatgcacaagcttcagtagccgatttgatcaagtggaagtaagggtatcagtgattgaagatcaaattaatgaaatgtagcaagaagagaagtttagagaaaaaaagagtaaaagaaaaaaacaaagcctccaagaaatatgggactatatgaaaagaccaaatctacatttgattgatgtacctgaaagtgacgaggaaaatggaaccaagctggaaaacactcttcaggatattatccaggagaacttccccaacctagcaaggcaggccaacattcaaattcaggaaatacagagaacaccacaaagatactcctcgagaagagcagcctcaagacacataatcatcagattaaccaggttgaaatgaaggaaaaaatattaagggcagccagagagaaaggtcgggttacccacaaagggaagcccatcagactaacagtggatctctcggcagaaattctacaagccaaggagagtgggggccaatattcaacattcttaaagaaaagaattttcaacccagaatttcatatccagccaaactaagcttcataagtgaaggagaaatgaaagccttttacagacaagcaaatgctgagagattttgtcaccaccaggcatgccttacaagagctcctgaaggaagcgctaaacatggaaaggaataagcagtatcagcccctgcaaaaacatgccaaattgtaaagactatcgatgcaaggaagaaactgcattgacaaatgggcaaaataatcagctaacatcataatgacagtatcaaattcacacataacaatattaaccttaaatgtaaatgggctaaaatgccccaattaaaagacacagacgggcaaattggataaagagtcaagacccatcagtgtgctgtattcaggagacccatctcttgtgcagagacacacataggctcaaaataaaaggatgcaggaagatcttccaagcaaatggaaagcaaaaacaaaaacaaaaacaaaagcaggggttgcaaccctagtttctgataaaacagactttaagccaacaaagatcaaaagagacaaggccattacataatggtaaagggatcaattcaacaagaagagctaactatcctaaatatatgtgcacccaatacaggagcatccagattcataaagcaagtccttagagacctacaaacagacttagactcccacacaataataatgggagactttaacacctcactgtcaatattagatggattaacaagacagaaggttaacaaggatacccaggacttgaactcagctatgcaccaagcagacctaatagacatctacagaactctccatgccaaatcaacagaatatacattcttctcagcaccacatcacacttactccaaaattgaccacatagttggaagtaaagcactcctcagcaaatgtaaaagataagaaatcacaacacactgtctctcagacaacagtgcaatcaaattagaactcagggttaagaaactcactcaaaactgcacaactacatggaaactgaacaacctgctcctgaatgaatactgggtaaataacgaaatgagggcagaaataaagatgttctttgaaaccaataagaacaaagacacaatgtaccagaatctctgggacacattcaaagcagtgtgtagagggaaatttatagcactaaatgcctacaagagaaagcaggaaagagctaaaattgacaccttaacatcacaattaaaagaacaagagaaggctgggcacggtggttcacacctgtaatcccagcactttgggaggctgaggcgggtggatcatgaggtcaggagatcgagaccatcctggccaacatggtgaaaccccgtctctactaaaaatacaaaaaactagctgggcatggtggcaggtgcctgtagtcccagctactcgggaggctgaggcaggagaatggcgtgaacccaggaggcggagcttgcagtaagctgagatcgtgccactgtactccagcctgggcgacagagcgagactccgtctcaaaaaaaaaaaaaaaaaaaaaaagaactagacaagcaagagcaaacacattcaaaagctagcagaaggcaaaaaataaaaataactaagatctgagcagaactgaaggagataaagacacaaaaaacccttcaaaaaattaatgaatccaggagctggttttttgaaaagattgaaaacaaaattgatagaccactagcaagactaataaagaagaaaagacagaaggatcaaatagacacaataaaaaatgataaaggggatattaccaccaatcgcacagaaatacaaactaccataagagaatactataaacacctctgtgcaaataaactaggaaatctagaataaatggataaattcctggacacatacaccctcccaagactaaaccaggaagaagttgaatccctgaatagaccaataacaggctctgaaattgaggcaataattaatagcttactaaccaaaaaatgtccaggaccagatggattcacagccaaattctaccagaggtacaaggaggagctggtaccattccttctgaaactattccaatcaatagaaaaagaaggaattctccctaactatttaatgaggccagcatcatcctgatactaaagcctggcagagacacaacaaaaagagagaattttagaccaatatccctgatgaacatcgatgcaaaaattctcaataaaatactggcaaaccgaatccagcagcacatcaaaaagcttatccaccaagatcaagttggcttcatcaatgggatgcaaggctgcatccctggcatcaccatatgcaaatcaataaacgtaatccaccacataaacagaaccgaagaaaaaaaccatatgattatctcaatagatgcagaaaaggccttcaacaaaattcaacagcacttcatgctaaaaactctcaacaaactaggtattaatggaacgtatctcaaactaataagagctatttatgacaaacccataagcaacatcatactgactgggcaaaaactggaagcattccctttgaaaactggcacaagacagagatgccctctgtcaccactcctattcaacatagtgttgggagttctggccagggcaatcaggcaagagaaggaaacaaaaggtattcagttaggaaaagaggaagtcaaattatccctgtttgaagatgacatgattgtatatttagaaaaccccattgtctcagcccaaaatctccttaagctgataagcaacttcagcaaagtctcaggatacaaaatcaatatgcaaaaatcacaggcattcccatacaccaataacagacaaacagagagccaaatcatgagtgaaatcccattcacaattgctacaaagagattaaaatacctaggaatccaacttacaagggatgtgaaggacctcttctcggagaactgcaaaccactgctcaacgaaataatagatgacaccaacaaatggaagaacattccatgctcatgtataggaagaatcaatatcatgaacatggccatactgcccaaggtaatttatagattcaatgccatccccatcaagctactaatgacttttttcacagaattggagaaagctactttaaagttcatatggaaccaaaaaagagcccacattgccaagacaatcctaaggaaaaagaacaaatctggaggcatcacactacctgactcaaactataccacaagtctacagtaacccaaacagcatggtactggtaccaaaacagagatatagaccaatggaacagaacagaggcctcagaaataacaccacacatctacaaccatctgatttttgacaaacctgacaaaaacaagaaatggggaaaggattctctatttaataagtggtgctgggaaaactggctagccatatgtagaaagctgaaactggatcccttctttataccttatataaaaattaattcaagatggattaaagacttaaatgttagacctaaaaccataaaaccctagaagaaaacctaggcaataccactcaggacataggcatgggcaaggacttcatgactaaaacaccaaaagcaatggcaacaaaagctaaaatagaaaaatggaatctaattaaactaaagagcttctgtacagcaaaggaaactatgatcagagtgaacaggcaacctacagaatgggagaaaatttttgcaatctatccatctgacaaagggctaacatccagaatctacaaagaacttaaacaaatttacaagaaaaaatcaaacaatcccattaaaaagtgggcaaaggatatgaacagacacctctcaaaagaagacatttatgcagccaacagacacatgaaaaaatgctcatcatcactggtcatgagagaaatgcaaatcaaaaccacgatgagacaccatctcacaccagttagaatggcgatcattaaaaagtcaggaaacaataggtcctggagaggatgtggagaaataggaatgcttttacactgttggtgggactgtaaactagttcaaccattgtggaagacagtgtggcaattcctcaaggatctagaactagaaataccatttaacctagtgatcccattactgggtatatgcccaaaggattataaatcatgctactataaatacacatgcacacgtgtgtttattgcggcactattcacaagagcaaagacttggaaccaacccaaatgtccaacaatgatagactggattaagaaaatgtggcacatatacaccatggaatagtatgcagccataaaaaggatgcattcatgtcctttgtagggacatggatgaagctggaatccatcattctgagcaaactatcgcaaggacagaaaaccaaacaccgcatgttctcactcattggtgggaactgaacaatgagaacacttggacacagggtggggaatgtcacacaccagggcctgtcgtggggtggggcgatgggggagggatagcattaggagaaatacctaatgtaaacgacgagttaatgggtttcgcaaaccaacatggcacatgtatacatatgtaacaaacctgcacgttgtgcacatgtaccctagaacttaaagtataataataaaacaaacaaacaaacaaacaaaaaaacaactgacccacagcagatttttagcaatctttgactttcctgaagattgagtccctttggaacactgtggagggtcctttcttcatgtcatcctttcaaaaaaaatatgccaattgaaagacagaatgaaatctatttcatcactgttggtctgcacgacgttatttatttagccacatgtcctttccttatttccagctagataagtaacagatacagagtatacttagttccatgctgcattcctgtaaagatgcccagtttggcatttttaaggatgaagtacgtttattttgttttcttgcaaggatttattgtaaaagctatatgtgtacatcaataaaacattgttaaatgcagcattgctaaagaggttggataataatttgagatataagttcacaattatgtttccccttttttttcgctacctttgaaactcgcagaggtttgggtttcctagcctcaggttcggggtggagcggggctgggcagggcagagagcatagggaccttcatggcttcctggcatttatttccaaaagcctcaacccactgaagagggcaggcttggctggagaaatggttttctgtctgactaaaaagagattttgagttaggagtgggaacaggaggaggcctgtgagtctctaagaaggtggttctgccattttcttgggagacctttggcagggaagcagagtgagctgtcaacaaaggcagggacccagacactaatttcattgttcccaaagtggtatctgcgagtcctcataccttcaggaaccatgagcacagggaagatgttcttagctataccctgtgtggggagatgaccaaagataggacctcccatctggtctccagctcttcccaaagccttggtgttgacctgggcctgggggttgacagggaaaccacaagaacagctgagattaaatgcatcatcagttagatgggatggggaactcatagtcagtaataagtttgattagaaagaaatagagatatttcacattggaaaaacccttttagacattggcttacgcaagaaattcatgaccaacaacccaaaagcaaatgcaataaaaacaaaagtaaatagctgggacttaattaaaccaaagaggttttgaatggcaaaaggacagtcagcagagtaaacagagagcccacagagtgggagaaaatcttcgcagtgtatacgtctaacaaatgactaatatccagaatctacaataaactcaaacaaattagcaaggaaaaaacaaacaatcccatcaaaaagtgggctaaggacatagacagttctcaaaagaagatacacaaatggccaacaaacattaaaaaatgctcaacatcactaatgatcagggaaatgcaaatcaaaaccacaacgtgataccacgttactcctgcaagaatggccataatcaaaaaatcaaaaaacagtagatgttggcgttgatgcagtgaacagggaacacttctacactgttggtgggaatgtaaactagtacaactgctatggaaaacagtgtggagattccttaaagaactaaaagtagaactaccatttgatccagcaatcccctactggggatctacccagaggaaaagaagtcattatacaaaaaagatacttgcacacatgtttatagcagcacaattcacaattgcaaaaatgtggaaccaacccaaatacccatcaatcaatgagtggataaagaaactgtggtatatatatatgatggaatactactcagccatcaaaaggaatgaattaatggcatttgcagcaacctggatgagattagagactattattctaagtgaagtaactcagaaatggaaaaccaaatatcgtatgttctcactcgtaagtggtagctaagctgtggggatgaaaaggaataagaatgacacaatggactttggggactcgggggaaagtatgagaagggggtgagggataaaatattacaaattgggtgcagtgtatactgctcaggtcatgggagcaccaaaatctcgcaaatcaccactaaagaacttactcctgtaaccaaacaccacccgttccccaataatctatggaaataattttttttaaaaagaaagatatttctagcacatatgagtttatggatggagactcatgcctgccacactgtgaaaacattcttcccttcaaaatccctatcagtgtaatttgaagtgaatattctagtaccacatgcttttggactctaaggaagagatataatgtacgaaaatgtggtatctgaatgcagcaaattgaaaaataccagtccagatactttggggccatgcagagagtttcccagtcaggtgtaagtgtgggtggtggtggtttgaatactgaagggatggacaggtgggggtgacaactaagagctgccacctggggagaatcctaggcagagtctgggcctggacaacccaaccagtagtgaccgtgggccggacgagcctctgggctctgcagctccgtgtgacacaggctcctagccaggagctcattccgagtcagaatgtgcctgcaattaggtctcaggaatcttgacaagcagttgtaaaaaatctcaaagaaaggaagatatagaaacaagctggagagacgagaaaacaaaaacatttgatctagatggttcttttccacttccagtttgggaccggaactggtgactgaggttgggggaggggagctcctggctgcagttgcaggctgggaaggaactgcatctagttgaaaagcgagaggctttcagctgggctgtcttcccacctggaaccaaggcaggggagctgggattacaggatggctgtcacagggaatgtagagacctacacctcagcctcaagcccagagggggaggggattgagctaggagctcaaaacagagacttctaggcactgccctcggtcgcaggccaaagaaagaagttcaagaaagctgttggaataggttatgtaagaatgagaaacaatccacactgtaacaagaaccccactcgtgtgtgtgcatgcgcgcatgtgtgtatgtgcttgtaggtgcgtgtgtgggtgtgtgcgcctgtgtgcatgtgtatgtgtgcatgtgtttgtgcatgtgtgtatttgtacatgtgtgtgggtgtgtgcgcgcatattatgtgtgtgtgcttgtgtgtgcgtgtgtacgtgttcatgtgcatgtgtgtatgtgcttgtgtgtgtgtgtgcatgtgtgtgtgtgtgtgtatgcatgtgtgcctgtgtggtggtaatgaccacaactgggaagccagcctggaaaaagccggcctggaaagacttggctttatttgtgtccagggaatttgggaatgagcattctgtcttggccaggaggtggaagaaaaatgcaactaggaagggctacttccaacgaacagctttaaagagttgcagttctggggaaaaggtgagagataattctaaatgctttgtcaagtcaagctggcccagggaataatctggttatctctaatttaccccttcctatgctagtatcccctcttgctataatcaaattgctttttaccctgagttgttaggaccaggggccatgtaagaaatacataaaaataaaattaagagaaaactctaagtttgtggtcactgaaagtaaagttcttcataagttttctccagctccaaaattctgtgattcacacattttacaatctataaaataatgcaatatcaataataatattgtttgctgtcttctgagatctccatgggaaagatatgctaggatattatagaagttggcccaaactgtgcacaaatggattagagtgagcagaatcaagtaaaagaatggtttgaataataacatattgataacagataatacaaacttttttcattaagcttcagaagaatcttagtagaaatgcattgtttggaatgcatatgctttggtctcaataaaaatatccggttgcagagatatttcatgtggtttgaactaacaggcaaaaaattaaaaattcattggtatacactaattcatgcaattgtatattttggaggtaagtgtaatggcataggtttgctgtaatggaactgattggaaaatgatctcttggagaaaatttattgctggtcataagatttctttggtttagaaaaatgctgggtttagtaaaatctgaggcactaaatgaaagtctgctttaataaaaatgtggatctgagaactgtggtttttagtaagtgggcatttgatccattaaaattgtattggttttattctttacgttggcttttcctgaaatccatcagtttgaagcatgaagtaagcacttgccagatattgctccaataatgaaacattgaaagcaaggccctgaataactgttaaaacaagtcctattaatcagctgtgacttgtccctttgtaaacttctcaaaatggaaaaagaagcagtttatttcacttttgttgaagatggcaaagcagtaattttattgtcactgaatcccctcagcatcctagaactcaatgatgaaaaaatatgtacagaattagatcatgccgcctgcttgggctgtctgcatctcttcttccatacagagttccccagtgctttgtctaggcgaagctgagctggacccctgacgaggactccgccactctccttggatgaggatcctgtggtctaactggccttattgttaggaaattgttcataaaattaggaaactcagagtgaacagagaactcagacaggactcttccttgcagagggtaacgtacatgtggaatgagttactgagaaaagtgattgaggcgaagagcacaaatgaattcaagagagttccaggtttatttctggacatggcagaggagggaggggatgaggaggaggccagtaggaggtagggttaagatgcatttttgcaggacaggcatgtaaataattttgcttattcttcaaatttccttttacgattgtggaatattcccaatgaaaggctgcatgttctcatccatttggcactcatgggtacagcagggtcagattctggtcctgccgctgtctctgagggagatggtttctattgcagaggctggggggagtgggggtatcccacctgatccagagtgaacaattcagcagcaaaagaggagtcagagccgggcactcccagtgggtttctggcctgaaagtgcaaaaccaagaacttgcctctgaaagcctctgtttttaactatgttttcagctgggaaagggcactgaagaccagttacatggaagaccctattttctcctcattgcttcaatgttggacttatgaatgtggtagtctgctagggctgcacaaagtactacagaatgggaggcttaagcaacagacatgtaaattctcacagttctggagaccagaagtctaagactagggtgttggcagggatgctttcctgtgaggccttgctccatggcttgtcttctccttgtgtcttcacatggtctttgtgtgtgtgagcgtgtgtcctagtcttcttttcttacaaggacaacagtcatgttggatgatggcccatccatatgaccttgttttagcttaattacttttttatatagcctatctccaaatatagttttttatatatatatatgtatatttttagagacggagtctcgctctttcacccaggccagactgcagaggcgctatctcggctcattgcaagttctgcctcccaggttcatgccattctcctgcctcagcctcccaagtagctgggattacaggtgcctgccactgcatctggctaaaaatacaaaaaatatagttatattttgaggtaccgggggtgaggaattcaacatgaatttggtgaggacacaattcagtccatagcactgaggttgaggaagaaactggaagcactggaagagttttgctgcagctccaagggagaaggacacacacctggctgggagcctttgtggcagcctcgaggtctagcctagaaggggttgtaaaagggctgacaaagggaggcctgagcttctggctcacagcactgggtgctgaggtctcccagcaactgactcatcaaccctgaagtcggaggctcttggaagctgaggtcctcctgccctgcactcagccccactcatgatcccctttgatgctctgcaggtagcacatgcaagggagaagggggaaatgtggcaaagggggatcactaaatggtcaaaaactgccttggctgggatgtaagaaaccaactgttttaggcagggaaacgttataggtggaggtgatgccaacaggagaggaacctgtggtgtggtatagtgtgtcagggtgggagagagagagctccatgtgttagtcctccaagacacagaatttattagtgtagaaaacaactccagacatggagcccttttaaactttcacagcttggaggttcagtgccatctgccttgctctgaacccagtaccccaggctggcagccaggaggaggaaattcagttccagtgctgtcaatggggctcttgctatatttgaggtttcacatcatggccacttgcctccacttttcctatgtcttctgttttccaccagaccccagagtttttcttagaaagtttataaggcccaatgtgagtaggggctcaaagacaaggtcaagggcaggcaagatggatgaggcaaataactcaatgagcaagtgacggcaggcccttcaggccgccttctcatgcaattgatagttgctccttcctcacatttggtttggttccctaaatgttaaatcatctctaggataagcaggtgatagcccatgaatggagccagatgctgagatgttgttcagcttgagtggcctgcagttcattcctgaccaagctgtggtttgttcctgctggctgttggatcacctccttcaaggattcatcactggataggccactgttggccattggagctattccaccaagactgatctgaactctccctatgagacttttctttttccagtaggctccatatctgattctatgaaaagttcagcccaaatgagaggaccttgggaacacatgtcgatagaacagagtccagctcctcaaactgcctctctgacttatctgtgcacagagcaatgctttatgtggtaaatcctcaactgacattgtcaaattgagtgaactgacatcaaaaaagtgggggaaacaaggtagctagcatcagaagtgttattgtcagctgccagttatctccaggtatctgtaccatttataaattaagctgggatatttacacaagtccagccttctctttctgttcctagagtaagaagttatccttttattgttccataaaatagggaagcttcatatgttttttaatacagattttgtgatgattacatggaggcagtcagtgtctggcatgcagtaagtactgtatgtaccatttcatcattattgctattgtcatcctcaccactgaaattagataaaaaggctttcaaggttgagattccttttgaaatcaatggtgagtcaagcagctagtccagaaggagctgagctcctcctctttatgacagtttttagcgtgagagaggcagcattgtcctgaaaagaagagatcccaaggctcagctgtgagaatagagtctttacatctgttgaaatcaggaagtaactggaattcacaaatttctggtcacttgagatttcctgactgttttatgaaccacagttgaacataaattaatcttgggaacatactggagtttacttgtgtctctagaccattttatagcccagatcttttcctgaaagatggctttgctgttgatttccactttccttaggatctttacagaaacttctccagcttctgaaagggccagaagaatttacctgtctgaaagcagaggtcacacatgaatggattttcttgtagacgagcagtagttccttagctttgaaggtgtcgccaatggatttttatacatactactagagagtcaaatatttggcaggttgattcaaaagaacatttcactgggatgagggagcactaaatatacatggtgagcagatttgtcttttaccaaatgcatttgttatgaattacgatgaatgcttcttcctttagcgttatcacatttttttctattgtttcagtactcaaaaatgtgactgtaggaaagactgaaaatagccaaggcattacccttgtttctagtaagcctgaagaagacagcagactggtcgataagtatggacatcaaatgtgtttatgtgatccatctagtccagaaatatttgctcagatcctaccatatgtctggccctgagataaacatttgctattaggcagtgttcttgtctctggttttaaggaacagaacactactcaagcatgctcatatatcaaatagattttattgaaggcaccattgtgacagctcagggaaaatgataatagcagagtcagatgtgaactagttctaggtactgggaaatgatcaccatctccaacagctacccttgctctctgttttggcctctctgtatcagtctcagttctctgcctcccaaagtactttttttttttgaaaatagtttgtatcttgttataataaggcaactctaagagttttcaacaaaatacattttgtaggcttgggtagttagaatattcataccataaaaggtaattttccagataactccctgctctaaaatttcagtttctctttacagattactaggaaggtctttttcattgatgtgaaggactttgtcactttaggtaactaatactactgagcatattaatacccttcaacaccatgctaatcaatgctgaacaacagcatacaggtatcactaaagagaatacaatgctacaataaccaaaagctttgctctaggaggccaaaggggaaaaccgtcttgtcacttggctgccacttcaatgaagtaattgggtaagactcatttattcctaaacaacagttgccaaatttgaatggaaatgagtatttggatttagtcattaatgttcaaggaaatgctgcagcaattctctgaatatttccaaagaatgcatcacaatccaggaatatagaatgtataaggctacttttacaaagcgccatcagagattaacatgttgcatgggcttgcaacactggcactttgatattcattaccatatgtaaattaaaaactgccttgaacattaagattgttaatttgagtgtggggaaaaactaatctaatactcatttcagtctttacatctgttgaaatcaggaagtaactggaattcacaaatttctggtcacttgagatttcctgactgttttatgaaccacagttgaacataaattaatcttgggaacatactggagtttacttgtgtctctagaccattttatagcccagatcttttcctgaaagatggctttgctgttgatttccactttccttaggatctttacagaaacttctccagcttctgaaagggccagaagaatttacctgtctgaaagcagaggtcacacatgaatggaatgaatgagtgtccaatgatagaggatgtgagccactaggaatattctgtaatcaaatatagatatgtaaaatattatttcgtttcgtataattagatacagagttagatggaatatctatagactgcaacaaattaaaccaaaatagactcttacatatttgttatgggttttttgtttgtttgttttctttttttagagacagggtctcactctgttgcccaggttggagtgcagtggtgtgatcatggctccctacagcctccacctcctgggctctatgagtgtgtgcccccaagcccagctaatttctgtgtttttttctagagatgagggtcgcactatgttagctggcatcttggaaggctttttaaattatttgctttaaatcctttaagtaaacagattaaatccctatttgaaataaaagtagctgtttactcatgtaaatgcattgtttttccttgactacttaaaggcaaacagattaaaggacatggattgtctaaagaggctttggtgaagagtatgttgaaattcctttttttttccctactgcaatccttttcaccaattcatttaggctttctatggcttttaaaagatgagagagaaaagtttttgtttctaattaacaaggtttcacaagcaggcagaggcattactgtttccatttaaaaagaaagaaaacctagaaaaatggtgacatgttcctccaccggcaggatgggggtaagggacaactttgggcatgccaagatacttttttcactgagagatttattttaaaatattactttataagcaaaagggcaatctatcattggattttccaacaccatgttggtgttttaattaaaatagcagggtgcatgatattaatgaacaggcattggttctcaagtccttctcaagagttaagagggctggcgatagtcttgtctcaaactcaaataaagggcattttcataattctcagtggaacagtgaatatatttctcccttcccacaccatacacatttctcaaatgcaaatgtgacttttaaggaagcctgcctggctctctccgaattctggagccagtgataagagaacaggacacccaccctgatagcccaccaacccagcagttgctttgcagtcaggggcaggggaggctgctcctccttggaggagggggctttttcagaggtgtgcatcccatgttgtcatcaattcctttctgttcacaatttcctacataggagggatttgaatctttttatagacattcttgactttgtctccagtttagaccatttgccatgttaatggtgaaaaggattcccagggtcaggggacatcgttatcttctcagcagatgtgtggcacagtggggcagcattggacttaggatttgaaaacctggacatcgaccccagctttgtcccttgttcatttattccgacaacaaatagtgaaagtcaattgcatgccaggcactgtccttgctgctgagacacccagggatcaggtgtggctcctgacctggggctcacctctagtacagcattttccaaatactccatggtggaggaccagcttttaaattttaaaaaattcatcatggcctaaaagttttgtgaagtacaatatagccaagtgactataaaagtgaaaataaagacatgcaaaatataaacacacatttcattgttattagattccacaagcataaaattattctgtcagagtgactatttggttctttctcatctctatagttatctcttcgcagacaggtaacagcctgtggaggaccacactgggtatcatttgtccggcaggtgctgcgatcctaagagggtaacattctccccagccactggaagtgggtggaatggagccactatagtaaatgttgttggatgcctacttagcagcctgcctcctgccccctgcctccttcctgagagactccaatttactcagctgtgcactggacacaccaccctgattgtggctggcctcacctgtaggttgtggcaaacttgactggcctaagggtaatcccatatgccttacccctaaatgggccaggaggaggcacttgatggggtctaggtccatgaacttcaaagtaagctttgctgtgaatattgggaaaggtctctctttgctctttctagacagctttcagaagcaattgtactagattaagaaagtgtgttagttggggttctctagagagacaggaataataggatagaagcatatatgaaaggaagtttattaaggagtattgactcacaatcacaaggtgaaactccacaataggctgtctgcaagctgaggggcaaggaagccagcctgagtccgaaaacctcaaaagtagggaagctgaaggtgcagccttcagtcagtggctgaaggcctgagagcccctggcaaaccactggtgtaggtctaagtgttcaaaagctgaagaacttggagtctgatgtttgagggcaggaagtatccaacacgggagaaagttggaggccaaaagacttagccagtctagtctttccatgttcctttgcctgcttttattctagccacactggcagccgattacatggtgcccatgcaaattgagggtgggtttgcctctccttgtactgactcaaatgttaatctcctttggcaacaccctcacagactcacacaggaacaatactttgcattcttcaatccaatcaaccatcacagaaagaaagcatgaagtccagatgactggaccaaaagaacaccctaggttggatggatgctggatggccaactggatgggaaaaaagcgggtcttgataacattctaattagccccaaaccctctattcccatgagccagtctcttctctttaagttgatgctagctgccgttttgtgttatctgttacagactaatacaatttgcaataattgaagatgcaatatttattgatatattattatcaattgaagtccatagcttacattaggattcactcttagttttgtatgttctgtggattttgacatatgtaaaatgacttgtgcccaccattacagtatcacatagaatggtttcactgccccaaaataccctctgttccatctatttatccctcttcctttccatggacccttgacaaccactgatctttttattgtttccatagttttgccttttccagaatgtcatgtagttagaatagtacggtatgtagccttcctaaatttgcttccttcacttagcaatatacatttaaggttattttttgttcccaatagctcacttctttttgtggctgaatatttcattgcttgtgtgtgccatagtttgtctattcattcacctattgaaagccatcttggttgcctccaagttctggcaattatgagtaaagctcctgtaaacattaatgtgcaggtttttgtgtggacttaagttttcaactcctctgggtaaataccaggagcaccactgctagattgtatggtaagactatgtttacctttgtaagaaactgccaaactctcttgcaaagtgatggtattattttacatttctataagcaatagatgagggttcttgttcctcttcatcttgccagcatttggtgtagccagtgtcttggatttttttccacagaatgatatttttacatatccctgaacaagggatgatgtttaaaattcttagcaatgagtatcaccagggcaggagctcacagaacagatgtggatattcaggtgaagattggctgatcactggcccagcctgcaacagagcgccatttgagatcattgccaaatgcttttatttgttcttctttttccctcactagaagagcaacagctcatgtgcatctggattactccctacagcagccctccctaacaagatgccaggactctctaagccgtatttaatatccctcctttgttaggaccccacatgttccttgagacattaagaatcctggcaagagtaggggtgatgaaattctttgttgtagggagcagcatcacatggaagtatggcttctcactgccctcagcaagtcccaggccaaaattggaggtggactacgtttattttcagcattctgccttcttaccatttcttgtcccttacttgtctcagacagtctacctccctagagaaatattttatagtaaaattgcagaaactatcattaacctaatgtaaccttatttagaggagagagtttctgccttttaagaaggtctaaggggaaggacattgctatacccaaagaatggagcttggatgttaggtaaacatccatgcaggatcctcactagattcctcagaggtgtctgctcacctaaaatttgattcccaggattcttctgggaatcagagacaagggaaagcaaaagtagggaagaaagaataagagaagaggaggtagagcaaagcaaggaatggacagaaacacaaaggagaaatgggaagtggatggagaggggaaacagatcactgttggcaatggtttcagatggtactgagcagcccctgcccaagtctccagtcattctctccatgatgctcagtgccatggtttttattcaaaagctcaatgataaatttcatttgtgcaaatttatctagaaagagctaaaaatcagagtcacatactctttgttttcagcgtgagagtgggttacaaatcccgcctctgttccccagtgctgtcttgcacatttggatttccgattaaccaacagatgtggggggaaaatggctggcccggccagagaggtcccccatgaccacacatgtgcaaatactgaggctcacaaatcattcctgtgaactcagctgtagctcatgtgattccccctctgctgcccacatcagatgcctgggagaatctgtgatggggatggagctgggtcaggcaggagaggagggagccagcagatttgactttaaggatgagtttaatcatctctttgccttgaatttcttttcccaacaaattctgaggagtgggaactctgtcagggagaatataatagaaaatatttccctacatggacaaataggagcttaatgaatgactaattaaaagatagggatcgtcagacccattggaaatatactgggtacaaggtagtttttctagatacaaacaacataatccttccttcaccgtgttagtttcttttccctacgtttcaaaagagcaaataaaaggttcacaagtttctcaggcatcaaatagttctgaaaaatgtcaacaacatcggtgtaaaactaataaaaatatggcacaaatttagcacttgtacttaaaggaaatataaaaatgggaaaaagaagcagatggaaaagcatgcttggggcttgagcagatcaacctcacatattaaaaagcaaaacaaaatagaacagttctggagggaatgtttagaaagaatggcttatttaattagaaaaataataatgcctcctttcctttttcttcaacaacattgaagttgaaaatggacttaagccattacctttggctgtcctagcaggggagggtttcagactttcatttctttcccagcctatggtgtgaggggaaaagttgtcttggcatggagatacactgtcagtgcagactcctcaaagatgaatggatgtgcatttaagaacagatagctgagaacatctctgaacatcagtttctgcatataaaaaatagagccaataaactcttcctcaccagtttcttgagaaaattaagtgatataacatgtgggaaatgcctgccttaggagacatctagaccaacactgttgcaatgatggacgtcttctatgttctgtactgtccaacagaatagccaccagccacatgtggccactgaacacttgaaacatgattaatgctatgaaggaaattaatttttacttttgtatgactttagttaatttaagtatgagagccacatgtgcctggtggctaccatgttggatggctcaggtctagacaatatgtgtaatgttgatcatgatgatgatcatattagttctgcttcctcaagttggagtcaaagttttatgctcagggaacttgtgcctctaggatgggatcagaaaacaaaacttttccccggcaagttgtatcacagttaggtttttgtaaatatggtcacctgtggccaggtaagctttgagctttgagtctgcctgttctttgattctgccttctcttaaccagttaccgggaaatgtcagggagaaatggacaatttatgtacaagaactaagcatgccttctttttggcatgatcagattctgtgctctgttaactattgttttcattttaaatgtttttattatgaccaaaaattgatagtcataggattgactgaacattcagaatggccttgtccttacagtggccacaatgtctcagaatgacagcagaaataataatcaaataagcatggtagatgcttcaattgagatttaagaagaatcagaatatcctgtggttttgaagtttcctatgaaggcagtcgctaaagaacattccactttgcataaaagacttcatttcaaggctttcagtcaaatgcatggctagctgatggatcccactgggcttaacaagcacaattaaggtcttcatcaaaccttaatagattggtgtcattgagcactgaccagtgcttggaatgtttttcttctctgcctatcatccatgtctgaaattttcctcaaatattggcaaagagaacatataagggtggattagtagttctcctttattcatatattgtgatattttaaaggcatctttcagtaaatgcgttatcatattagcatctaactgactgatccaatgggttatatcaaaatgcaaggtgcgtacacatgggactcatatctcaaattcattataatatccttgtttcatgcactcttaactctccagagggcttctaaatccaattctttcatttcaaataaatagtaatgagagcatctctgaatatcaacataatatacccaagatcctaggaaacaatgcaattggccatttaaataattagaagacgagatgcacttttgttggccaatgttggtgcaacaatgaaactacttgggacagaagttatcagtttgggaaaggaagcaggaacacagttagaagagataagaaggaagaaaaagaagctaaaggcacaagatgagagcaatagatagtagagggaaggtgtaagataatgagagtggtaagtggcaagttggagtctagcttttccctagaggggctcttcaggaagaaataaaaaatttttataaagtaccactgttctttcttttggcatgatcatttaaaagagggcaagaaggaaagtgaggtgagttgaagccctacaaaagccttgtaggatgtgattaagtgaccaaggacaggggcacatcccccttgggtcccatatattgcattgcaaccctttgatgacagtggacgcttaattaatgttatacttataataagattattttaggcttgtgttcatttttatccaggttatattcttgtgatatccttattttccatttataaagattacctcaactatttgtttcatcctttgatattggatatgctgatgcatttctctttctctttcttttcttttgttattctttgctttacaagcacaattaaagacttcatggaccctcattatcttataaacttccctctactacttcgtgtctacttcaaggacagaattttgttctttttttatgactgcatagtattccatggtgtatgtaccatattttctttaccaagactaccactgatgggcatttagggtgatttcatgtctttgctattgtgaatagtgctgcgatgaacatacatgtgcatgtgtctttatggtagaatgatctatattcctttgagtatatacccaataatgggattgctgggttgaatggtagttctaagttctttaagaaattgtcagctgggcgcagtggctgatgcctgtaatcccagcactttgggaggctgagacaggcagatcacgaggtcaggagatcgagaccatcctggctaacacggtgaaaccccgtctctactaaaaacacaaaaaaattagccgggcatggtggcgggtgcctgtagtcccagctactcaggaggccgaggcaggagaatagcgtgaacctgggacgtggagcttgcagtgagccaagatcacgccactgcactccagcctgggtgacagagcgagactccgtctcaaaaaaaaaaaaaaaaagaaaaagaaaaagaaatttttacactgttttccacatggctgaactaattgacacttccaccaacagtgtataagtgtgtctttctctgcaaccttgccaatatttgttactttttgactttttaataatagacattctgactggtatgaggtggtatctcactgtagtttcgatttgcatttctctaataatcagtgatgttgaactttttttcataagattgttgcctgcatgtatgctttcttttgaaaaacgtctgttcatgtcctttgcccactttttaatgttattttttcttgtaaatttgtttaagttccttgtagagtctggatattagatctttgtcagatgaacagtttgcaaaaattttctcccattctgtaggttgtctgttcagtctgtagtttcttttgctgtgcagaagctctttggtttaatgagattctatttgttaatttttgtctttgttgcaattgcttttggtatcttcatcatgaaatctttgcctgtttctaggtccagaatggtattgcctaggttgccttctaggagttttatagatttgggttttacatttaagtctgtaatccatactgagttaatttttatatatagcataaggaaagtgtcctgtttcaatcttctgcatatggctagccagttatcctagcacaatttattgaatagggaatccattcctcattgcttgttttttgtcaggtttttcaaggatcagatagttgtatgtgtgcagccttatttctgggctctctattctgttccatcagtctatctgtctgtttctgtatcaataccatgctgttttggttactatagccctatagcatacttcaacgttgagtagtatgatgcctccagctttgttcttttgcttaggattgtcttgactattcgggctcttttttggttccatatgaattttaaaatagttttttctagttttgtggagaaatatcaataatggtagtttgataggaatagcattgaatctataaattgctttgggcagtatggccattataaagatattgcttgtcattatccatgagcatggaatgtttttccatttgtttgtgtcatctttgttttgtagttctccttgtagaggtctttaactttttcggttagctgtattcctaagtatttttttttcttgtggcaattgtgaatgggattgtgttcctggcttggctcttggcttgactgttgttggtatatagggatgttaatgatttttgtacattgattttgtatcctaagacttttctgaagttttgctgatgttgtttatcagcttaaggaaattttgggcttagactatggggttttctagatttaggatcatgtcgtctgcaaatagggattgtttgacttcctctctttgtatttggatgccatttatttctttctcttgcctgattgccctggccaggacttccaatagtatgttgaataggagtggtgagagaggacatccttgtctcgtgccagttttcaaggggaatgcttctagcttttgtccacttggtatgatgttgactgtggatttgtcatagatggctcttattattttgaggaatgttccttcaatacctagtttattgtgagtttttaacataaagggattttgaattttatgcatctattgagataatcgtggtttttgtctttagttctgtttaaatgatgaatctcacttactgatttgtgtattttgaaccagtcctgcatctcagggataaagcctgctttattgtggtggatgagctttttgatgtgctgctggatttggtttgccagtattttgttgaggatttttgcattgatgttcattggcctgaagttttcttttttgttgtgtctccaccaggttttggtatctagatgatactggcctcatagaatgaactatggaggtgtccctccccctcaattttttggaatagtttcagcaggaatagtaccagctcctctttgtacatctggtagaatccagctgtgaatcttcctggtcctggacttctttttggttgataggctatttattactgactcaatttcagagttctttattagtctgttcagggacttgatttctttttggttcagtcttgggtgtgggtatatgtgtccaggaatttatctatttcttttggattttctagtttgtgtgcatatcggtgttcataatattctctgatggttatttgtattttggtaggtcagtggtaataatccccttgtcatttctgattgtgtttagttgcatcttctctcttttcttctttatttgtccagctagcagtttattttattgtttaaaaaaaaaacagctcttgcatttgttgatcttttgaaaggtttttcatgaagggtactgaaaccttttagttcagctttgattttggttatttcttgccttctccaactttggaattggtttgctcttggttctctagttcttttagttgtgatattaggttgttaaattgagatgtttataactttttgatgtgggaatttagtgctataaatttcccccttaacacttccttagctgtgtcctgcagattcttgtatgttgtatctttgttctcattagtttcaaataacttcttgatttctgccttaatttcattatttatccaaaggcattaaagagcagattattcaatttccatgtaatttcatgtttttttccagtgaatttcttaatcttgatctctaatttgtttgcaccatggtctgatatattgttttttatgatttcagttcttttgtatttgtttaggagtggttttttttctgattatgtgattgattttagagtatgtgccatgtggcaatgagaagaatatatactttcttgtttttgggtggagagttctgtagatatctgttgggtccatttgatccagtgctgagttcaggtcctgaatatctttgttaattttctgtcttgataatctatctaatattgtcagtggggtgttaacgtctcccactattattatgtgagagtctaagtttctttgaaggtttctaaaaacttgctttatgaatctgggtgctcctgtgttgggtgtatacatatttaggatagttaaatcttcttgaattaaaccctttactattatgtaaagtccttctttgttgttttttgtctttgttggtttaaagtatgttttgtctgaaactaggattgcaacccctgcttttttctgttttctatttgcttggtagattttttctccatcccgttattttgagcctattggtgtcattgcctgtgagacggggctcttgaagataattataccaatggatcttggttgtttatccagcttgtcactctgtgccttttatttggggcatttagcccattttctttcagggttagcattgatatgtgtagatttgatcctgtcatcatcatgctagctggttattttgcagacttgtttattaggttgctttataatgtcactgctctgtgtacttcagtgcattttgaagcggctggtaatgtttttttcttttccatatttagtgcgtccttcaggaggaaggtctggtggtaacaaattccctcagcatttgcttgtctgaaaagcatcttatttctccttcatctatgaagtttagtttggctggatatgaaattctgagttggaatttcttttctttaagaatattgaatattggctcccaatctcttctggcttttagggtttctgttgagaggtctgctgttaatctgatgggcttccctttggaggtgatctgacctttctctctagctgcctttaacattttttcttttattttgaccttggagaatctcatgcttatatgtcttggggatgatcttcttgtgaaatatcttactgggattctctacatttcctgaatttgaatgttggcctctctagctaggctggggacgttctcatgaaagatatcctgaaatatgttttccaagttggttccattctcctcatttctttcaaggacaccaatgtgtcatagatttggtctctttacataaccctctctttctcagaggctttgtttgtttcttttcatttttttttctctattcttgtctgagtatcttatttcaggaaaccatctttgagctctgagattctttcttccacttggtctattctaatattagtacttgtgattgcattatgaaattcttgtagtgtgtttttcagctctgtaaggtcagttatattaatttctatactggctactttgttgtcacctcttgcattgtttttatcatgatttttagcttcgttggattgggtttcaatgaactcttgtagcttaatgatcttcattcctgtacatattctgaattctctttctgtcatttcagccatctcagcctagttcagaacccttgctggagagttgatgtggtcatttggaggaaataagcactctggctttttgagttgtcagggttcttacactaatttctcatctttgtgggtttatcttccttcgatctttgagttgctggcctttggatttttttttttaatcctatttgatgaacttgagggtttggttgtggtataaagtggattcaatcaactggcttcatttctagaagatttaaggaggccaacgctgagctcccaactcctggactgcatgctctaactctggggacttgtattaggccctgactttgttctctgtctccttgaagttaggaatccactgcactgagggtgccaaagtgctcctcaatcactggttcctacagtccaatgggcaatatcagcaaaagtgttttgtagtgtagtgacagtgggattcattctctttcacatatgtccacagcagtggtggcagcagctgcagcaaagtgctagtgggtgccagggtgcttgcccctctgcaggtgttcagcaccgtggtggaggcaacacagctgtggggggcaggggcccttgctgatgactgtgtgcatggtcatactggaggtggtgttggctcaggggtggggcactggcagttgtagttctgggtgccttctctgtgccccacaagcatgtgtggtagctcagagcaagggaggatctgctgtcctctgggcctagtttcactcccatggcagtgttagcatgagggctggatgctggtaggggcagggatggctagttctgtgtctgtccaggctccatctgtaatggtgataagaagggagagggtgggtggactgcactccttgggcaatggtgggaccaggaaagcaaaactcacctgtgcagacacatgtcagcaaagcaatgtggggagttgttgtgggcctgggggaagcagtgctttggggagggagtgggagggctggtgcatggcaactgcctcactggagttctctgctgctcaggcatggtccactgttgcagaagctatggtgtggtcccacagggcagccaagacagccctgcaagcaggcatggccaggctggggtcctgggagaggccagcagaccaaggggtgctgaggtcagaccagccctgtctgatggaccaggcaatccagcagagtttaagactgacagatcccctagcgctaaagtctcctatgggatcaagtcaagcctagggggatgggtgtccctgcctgtgctctgctacagaagctcccgtatcaaaccctctgggctccatatcagctggcttgctgcccctaccacttctctaagcagctctctctaccaactcaagtgtccatggtggttgaggtttctcttcatcctggggttccagaggtccatggtgagagcaggttgttccttgccagttcaacccacctattacctcagagccactgggggccaggaatgaatttggtgtgctatagccctctgtagggtcctcagctttcttccccttcagctcagcttgcatatcttccatttgtgtactcttgatgccttttccctcttaagatttgttaggagcacaccagtcatcgcagtcctttggtgggagctgttctacctggttgtatctagttggccatcttgccttcccccgatgtatttttctaaactgccttctatttaaagatgcaatatgtctaactatataaaccttggatttcacactttcaatttattaagtacagttttataaatctagtatgaagatgaaagttgaattgcatttaatattctctgcttctaaaaccagacaattatgtaatattttagaagatggccataaaattgttgatttcctttaatgtcagggtttaaagagttaaacttcagttatctggataagtaaggtttataggacatctactcctagtggcctataaaacagagatgtacctgaatatacaagtagcatgtcctgctatatttctcactgttctgtaatgcaaagtttgagaatacaaatgggatccatttaagtagcaaggcaggtttaggggtgataacagtttatctaaattagaattaaagcccagaaatataattggtatatagcagacacctcaaagagtgttgatatatttgatctgatcaaatcttatatttagtcttccttggtctaatacccttagccttgcccctttatgcatactctcccgtctcttgccattataacttggtgatgttctcaggcttatccacccttcaacctcagaagacaaagggctccttcaaagccatgaacatgttgcaattttcatgcatgtttttatgtacattctattgtgcactctggctgcaaaaagagtaccacagactgcgtgtcttaaacaacagaaatgcattttctcacagttctgtaggctagaagtatgagatctaaatgtcagcagagttggtttcttttgagctatctctttttggcttgtagatgtccatcttctccttgtgtcttcacatgaacatctctctgtgtgtctttgttataatcttctcttcttataagaatacaaatcatattgaattaggatttacctatatgacctcattttaccttaaccaccatttttaaagaccctaactccaaatgcagtcacattctgaggtactgggggttagaacttcaacataatgaatttgaggggggacaaaattcaccccataacatattttttcagcctttaaggtctctttttcctgtgtgcacactccattgccatcagaagtagcctcttacccttcataaacactataccttccttagtgattaattggcacaatttctcaacacctcaatgcctttatgtccacatgcattttatatccagaccattaagagtgaataatcttgatgctactggtgccgtgggtcatctgtgtcccattatcatctggcaaggaaggtgtctatacctttctctactacgtgagcaacacaatatcaatatcctactttgaaattttgtttcctggaggcactctgatacctattactgtatcaatcaggatccaggcagaaagtagacatcatgcttaaactgggtaacttgaagataatataggaaaatagcaagcaatagtctagaatcctaaaagtctgaatctattatcaaccttaggtgtgaatgggcaaggggagggagtggattctgtcatacaacacatgagtgcaaaagagctgtgtagtgctgcttgatgcctattacttttgtgtaaagacacagccagctcacgtgagctcttaggaagggggatagagaaataaataccctgacctcatcttcctgccctctgggctgctggcctccaaaccagaagcagggcactggagcttaccaacatggtacacaaaggctggcatcctggagctcagagcagaggagaggaggtcagacagtggatctagaggggcagacaaaaatatccagaacaagtttcactctccatgggcctgaactagtggttgcaattgctggaaggtagaaagtgttagggggtgttcaggtatgggatccagatgaagtgggagagaattttagtatgctttgtgaagatttcccatgatttgaaattgtgtaaggactgtcccaaattttgcaaatgatgctatatcataagataaagaagacagtcatactcatttggtagctatatttatataatgtattcatataaatgtataaatatgtatattatgtaagtggctgatgtttacatttgcttaatcatatgagaatatagcaaaattataactggctcaaagtaatagttgttggagccaggttttaacccaggcaggatcattcatatgctttcaatcttaaccatcaggctggatgtctcctccactttccttgttgatctctgtatctgtctgttcttgctctgctataaagaaatatctgagactgggtaacttataaagaaaagaggtttaattggctcatgtaaaggtttaattggcttcctgtacaggttgtacaagaagcatggtggcatctacttctggggaggcctcaggcagcttttactaatggcagaaggcaaagcaggagcaggcctcttgcatgtcaggagcaggaccaagagagaggtgggaggtgctacacacttttaaacaaccagatctcatgataactcactcactcactatcatgaaaacagcactgagagggtggtgctaaaccattcatgaaggatccacccccatgatccaatcacctccgaccaggctccacttccagtattggggattacatttcaacatgaaatttgggtgaggacacagatccaaaccacatcaattgctgttaagacatgcagttgaacagtatgtttgttaaacagctggtatcacctggggcaatctctagtgcttggaattaggaaaactcctaattttgtggtccagggaacccataagcctccttaagactcctgcacgttttaggagagctaacttaccctggctcttgtgcctgggtatataaatttgtgccctcagatgtgaagcaacacattttgtcattacagaagcatcagtcagaaatggaaaatttctagaatgtatacataatataaaatgttgtaggggaaataagggagtgttttacattacatttgtcattgcaaattacttaaaactctatattagacgtttctattctccagtattttttcttaggtacagtattagttaactgccagaaaaatgcagtataacagctacagaatctctgtggcatacagcagtaagtgttgatttaggtgccaagccaaaataaactaagtgggttgactgagggttggctgggtttggattagtggctctgctgatcttggctggccttgctttatgcatccagatgttggctggagtcagctggtcttgactggggtatttctgctccacattctacccctttgactgaggccagagggctgaccttctgcttctcctcatggtgatggtaaaagctcatgtccaagtactcaagtgcatgacaatcatctgctgtgtcatgtccatgcaagtcacatggctgtacatttctcagtgctctgttataccattggatgtggatgtatttatttattcattacttatttatttttaaactactttattgagatgattgtcatgtaaaaagacatacatatttaatgcatacaacttggtgaatttggggatatgtatatacccatgaagctatcaccaccattaaggccagaaacttattcatcacctccaaaagtttcctcctgcttcctccttattattattgatgataagaacacttggggggaggagccaagatggccgaataggaacagctccagtctacagctcccagtgtgagcgacgcagaagacgggtgatttctgcatttccatctgaggtaccgggtgcatctcactagggagtgccagagagtgggcgcaggccagtgggtgcgcgcaccgtgcgcgagccgaagcagggcgaggcattgcctcacctgggaagcgcaaggggtcagggagttccctttctgagtcaaagaaagcggtgacggacgcacctggaaaatcgggtcactcccacccgaatattgcccttttcagaccagcttaaaaaacggcacaccacgagactatatcccacacctggctcggagggtcctacgcccacggaatctcgctgattgctagcacagctttctgagatcaaactgcaaggcagcagcgaggctgggagaggggcgcctgccattgcccaggcttgcttaggtaaacaaagcagcagggaagctcgaactgggtggagcccaccacagctcaaggaggcctgcctgcctctgtaggctccacctctgggggcagggcacagacaaacaaaaagacagcagtaacctctgcagacttaaatgtccctgtctgacagctttgaagagagcagtggttctcccagtatgcagctggagatctgagaactggcagactgcctcctcaagtgggtcgctgacccctgacccccgagcagcctaactgggaggcaccccccagcaggggcacagtgacacctcacacagcagggtattccaacagacctgcagctgagggtcctgtctgttagaaggaaaactaacaaacagaaaggacatccacaccgaaaacccatctgtacatcaccatcatcaaagaccaaaagtagataaaaccacaaagatggggaaaaaacagaacagaaaaactggaaactctaaaacgcagagtgtctttcctcctccaaaggaacgcagttcctcaccagcaacagaacaaagctggatggagaatgactttgacgagctgagagaagaaggcttcagacgatcaaattactctgagctacgggaggacattcaaaccaaaggcaaagaagttgaaaactttgaaaaaaatttagaagaatgtataactagaataaccaatacagagaagtgcttaaaggagctgatggagctgaaaaccaaggctcgagaactatgtgaagaatgcagaagcctcaggagccgatgcgatcaactggaagaaagggtatcagcaatggaagatgaaatgaatgaaatgaagcgagaagagaagtctaagaaaaaagaataaaaagaaatgagcaaagcctccaagaaatatgggactatgtgaaaagaccaaatctacgtctgattggtgtacctgaaagtgatggggagaatggaaccaagttggaaaacactctgcaggatattatccaggagaacttccccaatctagcaaggcaggccaacgttcagattcaggaaatacagagaacgccacaaagatactcctcaagaagagcaactccaagacacataattgtcagattcaccaaagttgaaatgaaggaaaaaatgttaagggcagccagagagaaaggtcgggttaccctcaaagggaagcccatcagactaacagtggatctctcggcagaaaccctacaagccagaagagagtgggggccaatattcaacattcttaaagaaaagaattttcaacccagaatttcatatccagccaaactaagcttcataagtgaaggagaaataaaatactttacagacaagcaaatgctgaccgattttgtcaccaccaggcctgccctaaaagagctcctgaaggaagcgctaagcatggaaaggaacaaccggtacagccgctgcaaaatcatgccaaaatgtaaagaccatcgagactaggaagaaactgcatcaactaacgagcaaaatcaccagctatcatcataatgacaggatcaaattcacacataacaatattaactttaaatataaatggactaaattccccaattaaaagacacagaccggcaaattggataaagagtcaagatccatcagtgtgctgtattcaggaaacccatctcacgtgcagagacacagataggctcaaactaaaaggatggaggaagatctaccaagcaaatggaaaacaaaaaaaggcaggggttgcaatcctagtctctgataaaacagactttaaaccaacaaagatcaaaagagacaaagaaggccattacataatggtaaagggatcaattcaacaagaagagctaactatcctaaatatacatgcacccaatacaggagcaccctgattcataaagcaagtgcttagagacctacaaagagacttagactcccacacaataataaagggggactttaacaccccactgtcaaagttagacagatcaatgagacagaaagtcaacaaggatacccaggaattgaactcagctctgcaccaagcagacctaatagacatctacagaactctccaccccaaatcaacagaatatacacttttttcagcaccacaccacacctattccaaaattgaccacatactgggaagtaaagctctcctcagcaaatgtaaaagaacagaaattataacaaaccatctctgagaccacagtgcaatcaaactagaactcaggattaagaatcccactcaaagccgctcaactacatggaaactgaacaacctactcctgaatgactactgggtacataacgaaatgaaggcagaaataaagatgttctttgaaaccaacgagaacaaagacacaatataccagaatctctgggacgcattcaaagcagtgtgtagagggaaatttatagcactaaatgctcacaagggaaagcaggaaagatccaaaattgacaccctaacatcacaattaaaagaactagaaaagcaagagcaaacacattcaaaagctagcagaaggcaagaaataactaagatcagagcagaactgaaagaaatagagacacaaaaaacccttcaaaaaatcaatgcatccaggagctggttttttgaaaggatcaacaaaattgatagaccgctagcaagactaataaagaaaaaaagagagaagaatcaaatagacacaataaaaattgataaaggggatatcaccaccgatcccacagaaatacaaactaccatcagggaatactacaaacacctctacgcaaataaactagaaaatctagaagaaatggataaattcctcgacacatacactctcccaagactaaaccaggaagaagttgaatctctgaatagaccaataacaggagctgaaattgtggcaataatcaatagtttaccaaccaaaaagagtccaggaccagatggattcacagccgaattctaccagaggtacaaggaggaactggtaccattccttctgaaactattccaatcaatagaaaaagagggaatcctccctaactcattttatgaggccagcatcattctgataccaaagccagacagagacacaacaaaaaaagagaattttagaccaatatccttgatgaacattgatgcaaaaatcctcaataaaatactggcaaaccaaatccagcagcacatcaaaaagcttatccaccatgatcaagtgagcttcatccctgggatgcaaggctggttcaatatacgcaaatcaataaatgtaatccagcatacaaatagagccaaagacaaaaaccacatgattatctcaatagatgcagaaaaagcctttgacaaaattcaacaacccttcatgctaaaaactctcaataaattaggtattgatgggacgtatttcaaaataataagagctatctatgacaaacccacagccaatatcatactgaatgggcaaaaactggaagcgttccctttgaaaactggcacaagacagggatgccctctctcaccactcctattcaacatagtgttggaagttctggccagggcaattaggcaggagaaggaaataaagggtattcaattaggaaaagaggaagtcaaattgtccctgtttgcagaagacatgattgtatatctagaaaaccccattgtctcagcccaaaatctccttaagctgataagcaacttcagcaaagtctcaggatacaaaatcaatgtacaaaaatcacaagcattcttatataccaacaacagacaaacagagagccaaatcatgagtgaactgccattcacaattgcttcaaagagaataaaatacctaggaatccaacttacaagggatgtgaaggacctcttcaaggagaactacaaaccactgctcaaggaaataaaagaggatacaaacaaatggaagaatattccatgctcatgggtaggaagaatcaatatcgtgaaaatggccatactgcccaaggtaatttacagattcaatgccatccccatcaaactaccaatgactttcttcacagaattggaaaacactactttaaagttcatatggaaccaaaaaagagcccacattgccaagtcaatcctaagccaaaagaacaaatctggaggaatcacactacctgacttcaaactatactacaaggctacagtaaccaaaacagcatggtactggtaccaaaacagagatatagatcaatggaacagaacagagccctcagaaataacggcgcataactacaactatctgatctttgacaaacctgagaaaaacaagcaatggggaaaggattccctatttaataaatggtgctgggaaaactggctagccatatgtaggaagctgaaactggatccctcccttacaccttatacaaaaatcaattcaagatggattaaagatttaaacgttagacctaaaaccataaaaaccctagaagaaaacctaggcattaccattcaggacataggcatgggcaaggacttcatgtctaaaacaccaaaagcaatggcaataaaagacaaaattgacaaatgggatctaatgaaactaaagagcctctgcacagcaaaagaaactaccatcagagtgaacaggcaacctacaaaatgggagaaaattttcgcaacctactcatctgacaaagggctaatatccagaatctacaatgaactcaaacaaatttacaagaaaaaatcaaacaaccccatcaaaaagtgggcaaaggacatgaacagacacttctcaaaagaagacatttatgcagccaaaaaacacatgaaaaaatgctcatcatcactggccatcagagaaatgcaaatcaaaaccactatgagataccatctcacaccagttagaatggcaatcattaaaaagtcaggaaacaacaggtactggagaggatgtggagaaataggaacacttttacactgttggtgggactgtaaactagttcaaccattgtggaagtcagtgtggcgattcctcagggatctagaactagaaataccatttgacccagccatcccattactgggtatatacccaaaggactataaatcatgctgctataaagacacatgcacacgtatgtttattgtggcattattcacaatagcaaagacttggaaccaacccaaatgtccaacaatgatagactggattaagaaaatgtggcacatatacaccatggaatactatgcagccataaaaaatgatgagttcatgtcctttgtagggacatggatgaaattggaaatcatcattctcagtaaactatcgcaagaacaaaaaaccaaacactgcatattctcactcataggtgggaactgaacaatgagatcacatgaacagaggaaggggaatatcacactctggggactgtggtggggtggggggaggggggagggatagcattgggagatatatctaatgctagatgacgagttagtgggtgcagtgcaccagcatggcacatgtatacatatgtaactaacctgcacaatgtgcacatgtaccctaaaacgtaaagtataataaaaaaaaacaaacaaacaaaaaaataaaataaaataaagaacacttaacataagatctaccctcttagcaaattttaagtatacaatataatgctgttagctgtaggcactatgctgtatagtaattctctagaaattatgtatcttgcaaaactaaaattttgtaccctttgactatcaccttccactttcctctcccccaccctggtaaacaccattttactctttcacttttgtgagtttgactactttagatttcacctataagtaagtgcttataagtctgaatgtttgtgtctctccaaaattcatttgttgaaatcaaattcccaatgtgatagtattaagaagtgggattagtgcccctataaaaaaggccatgaaaagcttgtttgccactttcaccatgggagggttcatcaagaaggggccctctataaagcagagagcagccttcattaggcagtgaatctgctggcgccttgatcttggacttcccagcatctagagctataagaaacaaatttctattgtttttaagccactcagtatatggtattttggtatagcaactcaaatggactaagacagtgagataatgcagtatttgtctttttgtgtctggcttatttcacttagcatagtgtccttcaggttcatccatgttgttgcaaatggcaggatttctttcatttgaaggctaacattccattggatgtatatgccacattttctttatccattcatctgttgataggcatttagattatttccatatcttgccttttgtgaacaatgctgcaatgaccgtggaagtactggtattcttttgagatctgatcccaatttcatttccactggatatatacccagaagtgagattcctggattgcaaggtagttctagttctataatggctacaaccaatttacattcccaccaacactgtgtggtttccttttctccacatcatcaccagaatgttttgttttattttatttttaaaataatagccaaaccatttggatatggtttaaatattcccaatactagatcaactattttctttgctgccaagtgaagaaaagcaagggttggaacagagccaaatttctggtgatgagctgttgctctggagacaattttctgagaagtgcacgttaaacagcatagcatttcagccttgaagtgagaagtgtagactatttgtgataatgaatatacaactgaggtgttccactggagcaagtcacttagaatcacagaaagcgtattatcaggcccatgatgtaaatttaaaatgtcttattcctcattttacaaacttatgtgggcatctttccttctcacaggaagcccatttcagtgtggaaaatcagtcttgtatgaaccagatttagaacagtgccatgattcgttcatattcaagagttaactgcttctacacagagttggtgtcagaaggcatgttgctgagtgccagcaactccttgggggttgagcttagatggtgtcctctgttctagcatgtgaatgctgtaaacggggtgtgttaggccattcttgcattgctataaagaaatacctgaggccgggcaaggtggctcaagcctgtaatcccagcactttgggaggccgaggtgggtggatcatgaggtcaggagatcgagaccatcctggctaacatggtgaaaccccatctctactaaaaatacaaaaaattagccgggcgtggtggcgggcgcctgtagccccagctacgcaggaggctgaggcaggagaatggcatgaacccaggaggcggagcttacaatgagccgagatcacgccactgcactccggcctgggcagtagagcgagactgcctccaaaaaaaaaaaaaaaaaaaaaaaaaaaaagaaatacctgaggctgggtaatttataaaaaagggcatctgcttcaggtgaggcttcaggagcttttactcgtggtggaaggtgatggggagccagcacatcacatcgtgagagagggagcaagagagcaaggaggaggagtcagactctcttcaacaaccagcgcttcttgtgtgaactgattagggaagggggagcacgcagccattcatgagggatccacccccatgacccaaacacctcccaccaggtcccacctctagaattggaggtcacgtttcaacatgaaatttggagggaacaaacatccaagacatatcactgaatgagatgtgctgagattgttatccaagctccatccaggtaagctagtgagaggctccatcctggagccaaaggtacacttgactttataaagtgtgcaatatgattataatcagatcataccctttttctccaggttttcagatattgatttacctaaccttaacatattatcaaatagccgttcaatgacatatacctttgctctgtgtcaattaacttaaaattatctgtgatgaaatactcggttctgaaattattctatacatactgagagcagatgctgccagagttcccatgattctgcacagaggaaggttctcatagtaaggatctgatgctgtgtctgcaggcttggcttggccatgggagtatgctctgtccatatgcagaagtcactcctggagcagctctcaaccagtgactgagagataaataacctggcttcctcacccctcaggtgagctgtgttccacacagtctaccggattcctccagggggatcgagcctcagctgctcaattattacctcagtaataacttactaattaatgcacctggtgttcactcctcttctccatttcacctctccgtttacctgcgtgcttcctgggattgcatctcaaaatgaactaaggaagtgaaatccttaccttagagcggaattctgagggaaacccaaactaagatagagcatcaatatgtttacttacattagaaaaaattaaggttcaaaagaaacataaccttgccatttagggttttcttcttcgtaaacttctcatttttttgccactcttagtatacagagtatttttttaaaattaaaaatacctatttctcattacaaaagtaatctgtattccttgtaaaagaattagctagaaatgactgccctggaatatttgtgtttgtctttccatcctttttacttgcatggtgggtttttaaaacaatgtctcccatcccataggctctttttcactgtgaccttaatactcctctcattgagagttgggacttggttgtttacccttcaacctgggcctgccttgaccaacagaatgtagtggaagtgatgctgggtgacttctgagatggaattataataatgtcacacacttacatctcggtttttcttttggacagacactcattagaaaaattcagctgccatgctgtggggaatctcaagttagctcacatgaatagaccacatggttaggggatttggctgggagctctagctgaggtcccagttggtagctaacatcaactgccagatattgagatgcttccatgttgttctcactcccagctgtcaagacgctcccagcttttgagtcttttcagctaatctgctagatgttgtgggacacaaaaatgctatctattgctgtatctggacccagtaaatgtatgacacatggaatctatgagcataataaaatgactgtttaatgcccgtgcattctgggtgtcttgctatgcagcaataataacttgaatattcctccttgccaatttctttgtattctctagcctttgtattctcatctgattggctgaggtaattgatgtcaatcctgttgggctgagtcttttgagctacatcaactcacaggtcttagtcagcttataacagatatcattgggggcatgtgaccatctctgagccaatcacttaatagccttatataagttaaaaatttgtgctgggcatggtggctcatgcctgtaatcccagcactttgggaggctgaggcaggtggatcatgaggttaggagatgaagaccatcctggccaacatggtgaaaacctgtctctactaaaatacaaaaagttagctgggtgtcatgatgggtgcctgtagtcccagctaccggggaatctgaggcaggggaatcgcttgaacctgggaggtggaggttgcagtgagttgagatcccactactgcacttcagcctgggtaacagagtgagactccgtctaaaaaaaaataaatacataaataaaaaaactgagtaaggggccgtgggtaaaaaaaaaatttaaccagaaagaaacactgtcagacacacatgcataggtacttatgaataaaaacaaaaacacaatttaaaaatataccaaagcataaaataaattacaaccgatgtatagaacaataggtaattgcaacacaaagaccatactcttatcaactaaaaatatattttgtctaacataaaaagaaacccaaagcattatgttatgcatttcttttgtgtacagctcctatcacagtatgggaaacatacagagcctttcctccatggtggatattctccatcttcagcaaatctgaggaaggtttgagtaactaacctaaaatctgtggatagatttttatcctttgatagtagtttatgaatttatatgcttgtgctaatttaaaactttttaaatatagcagcaagactgtgttgtataatcaaagaaaatgggaaaactaaccaaatcattgaggcatttttgcctccatcttggtagctttcatagtttcccatcttgagaagatcttagtacttaaattcctttagagaaatgttatactacagaagagagcgtccattttttctgcttcttcactgatgtctgtccctagatccggcaactccctggctttggagtcccagccctccttaagccatcttgtctctctttcctggggtccctgtccagctgggtgagcccaatgctctgactgcagctggacctcggtaccttcagcttctgtcatgctggagtcataacaagtgcctgtgtccagacttgggagtgcactaggttttccaaccacaacctgaaaagatgccgtggagacaaggcagtgggaaaagtgagttaatacacctcctgcctctgaagaggtaggctgtaaactgaaccaggagtcagagcaaaatgaatcagatgtcttcatccaagtaaatactggacattcatccacgacgtgaaaccaccatacaattcaaaaacattggcaggctctgttgagggagtgacgcagcagggggcctccaagccagagatgaggtggcacgggcagagctgagcaaggacacttctgccacatgatgcttggcacacgctgttgttccttgtcttgctttcaggtgccatatttgcaaaaacaaatggaattggaggccacgctgtatcccaactggccagctaagacctgctcatgaatcactgactagctccattacttagctaatgtgtcagagctggctccgctctaactgacctcccttgcctctaaaaagtgacacattgaattttattactgactctgtgtttcaaaacattttggggactgaaaaacccaccaggcaaatctcaggccttagaaagcagttaaactgaattgcaaataaaaggcttagaaagtccttaaaatcataaacttggcatctccaataggacaaatgaactttgtcttctcatctgagttaacagatttggaagaatcaaaatcttttctgttgtatagactacatgctaccatttccacaggcaagctgcccctaaatttggaaaacttttccttctgaaaccacccaatctctttagcttgatttgggcaaccgaatctcttaggcttttgcctctttgtgtccaaaactagcactgttcctgagagcaggctatcaatcatttacatattagtgtgacattcagtcagcatccatttaaataaatttactcagataaatatttattaagcacctactttgttctagatacaaagatgggtaagccactgcccctgacttttatgtgctgttaaaagaaaaactttagacaaattaaatttaatggaatttaattgataaaaaatgacttgcaaatcaagcagccccctgaaccagaataggttcacgtggctccagggctgccacatggttggataacatttatgaacagaacaagtaaagagacacagaaaacagaagtgaggtacaggattgattatagctcagcgtttgccttatttgaacatagcttgaactgttggctgcctgtgattggctgaaacttggctgctgggattggctgagactcactacttgttaagagagtaggttgcagtcatttacacattcagttaggtgatagtttgctatgtatggagaaaccttaagggcaaatttaaatatgtaaggaagcatctttaggctaaatctatttatttcttctttgagacaggttctcagtctgtcacccaggctggagtgcagtggtgtgatcacagctcactgcagccttcaaccttctggctcaagtgatcctctcacttcagccttggaagtagctgtgaccactggcatgtgccaccatgccaggctatttattttattttatttttgtagggactgggtcctgctatgttccccaggccagtctctaaccctgggctcaagtgatcctcctgccttggcctcccaaagtgctgggattacagggatgagccaccatgccctgtctggctaaacttaacagcacagtcaaagaggagaaacagacaggtaggtgctagtaagcaatgtgtaagcaggaagagagtggaaccaaagttctgtggagtcaaaaggaagaagcatgtaacaggaggcttgaattaaggcggcatttgagatgagcttctaaaaggagactttcagcaggcgtgagtggggtgggcgaggaagcagccattgccagcagcgaacagcacacacaggtgaaagtgggagaccttatggggacctgagtgtgggtggtgacatggtagacaatggtgagacaatgggactggaagggaatttgggccaagtcattgaggcctcagatgccataagacatcttatgtaatacaatacatcttaataatgcgggcaaaataataagacatcttaataatgcaggcagtagagagccaggagagagttggggtggcagactgacagggcgaggtctctgcttaaaagacatacagctttgatggcattgtggcaggtgagttggttggagacagagtgacagctaatgccagcagttgaggttataaatcaggtgaaggcagtggagattaaaatgagagaataaaattgaggagtatgttgcacttaggctcaatttaaacctacagaacaaagtgggcagaggagttgaaggcaacttaaaggtttttcacccaaatgagttttaaatatatttctaagcaaaagattgtattgtaggattatccacagtcaaagaaattccaggcatcatctgcagttagcagtgaaaagagaagaatttacaaatgatgaaaactgaaaacaaatgaatcttaatctcctttctttcatcctgatattcttattctatcccttattacttaaaggttaaattggaaatatttaggaatttttaattttatctgataaatgtttaacacaaagcatttaccaatggctacttattcttagttatccctagttaattacaaattatgcaatcgaataattttgtttcattatgccctagcatcatatccccacacactgagaacaagcagtgagttatcacactcaaagcaagaacaatctgtaatttcggcctgaagaggattctgcaattttcctaagaaaagaaggcctgccttccctctttgtgtgtgagcatcctagtgttgactctggaactctggatattgtggctgggtgccagccctgctgactaggctgccaggaaagggagtggagtggacactggcaacccaggccagaaataagcaaggagtaaacccaatatttcaaaagctttgggccataaaaaaataagtcaaaaggttttagtgatgagaggaaattggaactcagcccctctctattataaaataaacaaaacaaatacagccatttacaagcgaagtcacctgatcgttatttaactgtggttctgtgtaacgcattatcacccaatgggagacagtgagctgtcagggagggaacaaggctttggacttgggcagcctgaattggcaactgaatatctccacttactacttgtgtgaccttggacaagctgggcttttctgaacccaggtctcttaatcaggaaactatgataagtttcaccttcaaggcttgtcatgcagatcagctgagcagacaaatggagtactcaatcacctagcaggttgtcaaccatcagtcctttagtatgtgccaagttggttctctgctaggcacttggaatgtagtgagaataatcttgctctcacagtcccagtttctaaataaaatttttaatatcatatttatttaaaatatgttcattttctttgttacttttttattgatacataatatttgcacatatttatggagtacatgtgatattttgttacatgcatagaatgtgtaataatcaagtcagattgtccaactcctccagtgtttatttctgtgtgctgggaacatttcaagtcccctcttctagctatcctgaaatatacagtatgttgttgcaaactatagccaccctactatgctgtcaagcattagaacgtattccttctatccaactgtatgtttgtacccagtaaccaacctctctcatctcactgaacctccctcacccccggcctctggtaaccatcattctactctccgtgcccatgagatcaacttttatagctcctgtctatgagtaggaacatgcagtatttgtctttctgttcctggcttatttcacttaacataatatcctccaattctatccatgttgctgcaaatatcacaatccccttaacagtgagacagatatttaaaaagcaagcaaaaaatgaatatttttttttgcagtggctcacacctgtaatctcagcactttgggaggccgaggtgggtggatcacttgaagtcaggagtgtgagaccagactgaccaagatggtgaaaccccgtctctactaagaatacaaaaattagccaggcatgatggtgtatgcctgtaatcccagctactcaggaggctgaggcaggagaatcacttgaacccaggaggtggaggttgcagtgagccgaaattgcgccaccgcactccagcctgggtgacagagtgagactccttctcaaaaaaaaaaaaaaaaagaatattatagcaggacagttattgaccttagaccaaggcaagatgggctctgtggtttaaaagccccaccctgggcttcttcccattgagcccctctctttaggataaagggtctgcaaggccaaaatcacatgctgcacctgctcagagcccatgcccctcttctggacttgctcagggagtagaatcctggaattccatgctccaacaaacccacccttgttcctagggtgtacatgggtctttctttttgagggtatgctattccactgggatgggcacctcggacatggggtgtggctgctgtgatatttatagtttgtgggatggaggttggcaagtatgtatgagtgtgaggtcccctgtggtgcaggatggagtgggggtgagaagagaagtgggaagggcagctgtgaactggctctttctcctggtgcttctcagtgcagagcactgaagagttcaagaactctaccttccattctgatctcccagaccactaggaggatacactagtgtagaggcagataggaggagagaacaccttttgtgtcacagctttttttcttgatagcatctgtggcacacttagacatctagtagatgggcctacatttacactcttgttttgggcagggcatgtggttggcagaatattcttccaatgagcatcttttgactggcccattcatgtatcttagtttcttgaaccaactcatagtcatttttaaatctctctgttcctttatacaggtgtgcctcttacttggaacccactttccctccatttcctttgtaagtcttttgctcattcatcaccaaggttagaagtcatttctctgtgaacccttccctatcagagcaggtctgagcatgtggtgtccgttcagtgggggtaatgtgtgggcagctgaagtctgattcgtaccttccagaccaaaagaaaggcactggttccagcgtagtgtcccatagcagaaacatggctcggagctcagtttaaaggtgttccttgaatgaggccaatcctttttgggggaggggaaggggaaggagggtctcccaacccccgccttttttatttgagaaagaatctcattctgtcacccaggctggagtgaagtggtgtgatctcaactcactgcaacctccacctcctgggttcaagggattctcctgcctcagcctccagattagctgggactacaggcacccaccaccacaccccgctaatttgagatctccccttttttatcctttctcactgtatttatgtgtgtcttggtcagagtcttcgtctggattcagtgggatggcattacatggtggtgtaggtgtcctgaaactgaaggagaaatttaggtctgtgtggccacattagttcctctcaggagagagcaggcatccaacttcaatgaggaatgcaacagagagagagaaaaaaagaaagatcgggtgattgagtagacattgaggtctgaaaaaatgtagaagtcaagtcgaacaaataagcataaacatgtacttttaggaagaagtccatgttgctggtgccctgctcacattgctttggcccagccttgaaggacagctgcagagtggattctctcatctcccttcccagaggcatcctctggccaaataagggggcattctcggccatcaagctgagcaggccagtgaggggtgggcactgaggggcacacaccagcttgtgtcccactcagaggggcggttctgaggcatgctccctacagtctcccagagtggccccaggagggctaagcctcagttgcccatgatggcaatgctcattattgcaccctcgtggcttccttctctttcctgcctcatttcgtactcccaagctgtgctcccctgcatcacttcctaaactaaatcccttcatctaagaacttatcccagggtctgctttggggaagaacaaaagacaaagcacttatgatatactcaagactaacagaagcataagcttctgaggatttaaatgcaaatagaaacaatgcaatagaaatagactaaaaggcctgtgctctccttaacccacccagcctatttcagactgatgggcttggggtcattttctgccagagtgcttattgctctttaaattcttggttttccggacgtggaatattaacaccatctaataagttgaactacttgttctttattagagaactagaggaaccaggcccatatgtttgatggcaacttgacaaagctctattaagagctcacacctatgaatacagtgtggtttgccagaaaaggggcattcagtttccgagccaaatatagtacactgaagcactaagatgtatgaactgaatcttgacctgctggtatgtaaacttttcaaagttcccaaatttgaagacaggttggacatttttctagtggagttcctggacccaaagttattttttatgaagcagttttgtaaaatttatgatgtgaggttacaatatgcctttttcttgtgattcatccttcttgcaagcttctatgtagcaagccggcaaaaggcagtggaagggacttctggggacggtcctgtcatttcctgcagtattttcgtgagtcattcagcatcggtctcttccctactcctattgtctggctggagagaagcaccctttcataggtgagcttttcctacaaacatgagagattaaaaataagatcttcaaatgaagaaataatttgacatttattcattgaaaatcactcatcttcaactcatcttccatttacagctctacccctttcttttatggatggagaaaatgaggcccagaaaaataaatggatttgtccaagataaccctgattgtttaatcagggtgttgcagagctcacatccgctggtcatgtgtttgctggaggactcaacttttggagtctctgatttttatttgtaaaaaagaggtagtagtatagttcttgaagattcatcttacagaagtaaattgatggaaaaactactttattaaggcataattgacataaaataaacagcatgcacttaaagtgtacaatttgataagcattgacttatgtgtacatccatgaaactgtcactacaatcaagatggcaaacagccctcatccccaagaggttccctgtgccccttgtcatccttccctgcattcctccctctcttcctccctagacaatcactgatctgcttagtttacattttctggagttttatatagtggaatcacacagattttattcttttttgtatgacttcttttactcaacataattgttttgacattcattctttatatggaatgaatcaatatttattctttttatttttgagtaggattttaaggtatggatacatctcaacttgcttattcattcacctgttggtgggcatgtgagttgtttaagttttgggttattacaaataaagctgcttgaatgtttatgtatatgactttgtgtgtatttatgctttcattttttctttggtaaaaaccaagaatggaatagctgcatcatatggtgattgtgtttttttttaaactttataaggaactgacacattgttttccaaaggggctgtatcattttacattctcaccagcagtgaatgagattctagttcttccatatcctcaccaatacttgctgtggtcagtctttttagctattctaacagatatctcattatagttttagtttgcttattcttaatgactaatgatgtcaagcatctattcatgtgcttatttgccatacaagtattttttttccaagaaaatgtctgttcaaatcttttgcccatttttaaattgggtggtttattttctattatggatacaagtcctttatcagatatataatttgcaaatattttctccacgtctctttttcattctcttaacactgcactttgaagaacagaaaaattttaatgaagtccaatttattaactttttcttttatgaatcatgttttcagggtcatatctaataacctaataaaatttatctatgttttcttgtaaaattttacagtgataggtttaacatttaaatctattatctatttgcattgctctttttaatatggtataaggtgtgaaaataagttaattttcctttacacatatatatccatttttttaaaacagtacatttgttgaaaaggctgttttttctttactgaattacctttttatctttgttgaaaatcagttgttcatatacgtgtggttccatccatttctggattcttgattctgttcccaagatttagaatctatcatgtggtatgaatcctgtaactgtaagttaataaataatttatgtcaattatcttttacgtgtttggcacatagtggacccttagtgaatgctattttactgtcttcttttattggacatttttgctgtgactgtgaaataattactcccaactcctttaagttctctaagtcaacaattattaaatgattctcattgtgatctacccacctgagtgcttttgccgagaatcattacagaaacaatattctctgctcttaagaaccttatggcctataagagatggagataaaaatatattttttaagtaaacattttctttcttatgttgtatttccagttcatatcaaataaagcaagacatgcttgacggtagaatttgctttctgtgactccttctaaatatacatgattattcactccatgctaaaaacacaaagacatcaggacacaaagagagtgacctgtgaatgctgtaggagacagcaggattctttgaagaacagcctagttggatgtgctgagtagatttactcaagcttggtaactgttggaacacatttatacacaattatatataaattgtttagaatacaaaactttcttcttagtactgtacggatatgaagaagggatggatgtgagtcctgttgatcaaagacctaagggtctaaaaggaagaagcatgcctgggtgtatttcagacactggggaaagtgatgtgtggtgtaggagaggaggcgatatgctgcagtgaggttctaggagaggaatgggtcaatctactcagcactactaatattattgttactattttttaacataggtagctacctgtgtttgccccagtgagagcattaccaagcttagtaatgctgtcattggggccatctgagaactataatttgggtagactctggcctggaggatagcaactcccactgacaccaggaatcgggcactcctctatccttggctctgctttcttaagtgctacctccattctccagctttggtaggaaaggtagccccagcggttacaggtaaagtggcctgtgatctcagagagcaaggcttctgatgggtgatgaacgcccatccctggagtaatcactgtgatctgggagatgcgtttggactggaccggccagtgaggggcctacctacctgcctagatgaaaactatcacttgcacagaaatacatggaaagatgaagaggcataaagttaatggagattaattgtaccagctttgtaggagcacaggaataataaccatttatggaacaaatatttctatgtattttttttcaaactgtaattaagggtaccattgtccccaattctttacccctccctttatctctatcctttgccaagtgacttgcagtcccccacctctatgggaggagtatatgtcctttatccttgactctgggcgtgaccttgtgatttgctttggccaatgacaccaaggggacagtgacagtgttccagttctgatcctaggccttaagaaacgtcacgtgtttctgttgttcttgaacttctgctgtcttatgaaaagagcatgccctagctgggtggctgttcctggcatgggctgagggaatggagggtgaccagtggaacggggctgccccacacaacccacaaactcatgagcaaaatacattcttctggtttatgctactgagattttgaggttgtttattatgcaacagaagctaactgattcaagggccagcagggctgaatatagtatctcagcatctgtgaatgcaatgccacctatataaaggcagaggttataatgtacaccactttattcccaatgcctagaagattgcctgacacatggtagatccccagtaaacatactccaaaagtactgcttcactacaaagtgctggccactgtgacaggaacagaggtagaaatagacatatgatggggtatactttaaaggagtttggcttgtgtttggagagaccaaatggatatgttaagtttgcagggcagggtgaaaaaagtaccatattggaaataggttatgtaagtagaagtgatatgtgtgtcatcacagttgtatcagaggggtggtctagccccactcatatcctctgtcctgcacccatcaaggcacactggcctgactcctggctcccaccagtcatcacctacatttctttacccgataatctctctggccatcagagcctacttttctttcttgcacaggccagaagtaccagaatatgaatccccccgctactccctccaggagcagccctcagccaatgactaatgggagttggtgtataaataacccactgtcttggttctcatcccagatggatgacactgaggtgtgttctactgtggctctcagaattcccaatgagattaagctcctgttacccttagataacttgcttgaaaatgtatatcctgtgatcactccaaaataaatgactggttggtgaatttttgtcttagcatctgcttccggcagaatccaaacaaagacatgagaattaaatttttggtttcattcttgttttattttcttaacatacatgcttatatgtaaaccaattttgaattttatgtatcaacaatttaagttctactgctttaagattatatggacattaaatgtacagaaaaatagaaaccaacaaaagataaataaattaaatacatttttaaaaaagtctcgcgagttgtggtggcttaatattgccgtgagctaatgccttgagggctactctctctggagtgggaatggagctctcagtaattcgacagttttggccagtggcttgtcacacgggttgtgcattcacctggctttaggaggaagaggaggcatggcagccctgccttcatcttcctctttactttgccctcactatcactgttaacttcgattcatggatgcttttcagggatttttttttctaagccacctagccaattcgaggggtttagtgtacttaaaaccagatagtataatccataaacccactaaattgggcacatgtgagctgcaatatgtcacaagatgcagaaaaccagccctgagtgagggcactgccttccgcagctgtcctctggatctttcctgtaatgtcagtgacacatgaccgctggcatgcagcctgctaagggacggtgtccatctgcatatcaaccaagacaaaagcctggctcatcatttatttagagaaagcaaacataaatggaagaaattatattttcctcctattccatagtttatcatgtcttgccccacctgggtagtgtcacttgtcctgaagatggtaggagtgagggaaaagaggtgagccctttgaagtatagatgagttgagagccaaatatggagacagagcgtgaagactccttgtgggaagcatgagtggacaaggccagcgtccctagggagaaaggggaagcttttttttttttttctagatttttttttattatactttaagttttagggtacatgtgcacattgtgcaggttagttacatatgtatacatgtgccatgctggtgcgctgcacccactaattcgtcatatagcattaggtatatctcccgatgctatccctcccccctccccccaccccacaacagtccccagagtgtgatattccccttcctgtgtccatgtgatctcattgttcaattcccacctatgagtgagaatatgcggtgtttggttttttgttcttgcgatagtttactgagaatgatgatttccaatttcatccatgtccctacaaaggacatgaactcatcattttttatggctgcatagtattccatggtgtatatgtgccacattttcttaatccagtctatcattgttgggcatttgggttggttccaagtctttgctattgtgaataatgccgcaataaacatacgtgtgcatgtgtctttatagcagcatgatttatagtcctttgggtatatacccagtaatgggatggctgggtcaaatggtatttctagttctagatccctgaggaatcgccacactgacttccacaatggttgaactagtttacagtcccaccaacagtgtaaaagtgttcctatttctccacatcctctccagcacctgttgtttcctgactttttaatgattgccattctaactggtgtgagatggtatctcatagtggttttgatttgcatttctctgatggccagtgatgatgagcattttttcatgtgttttttggctgcaaaaatgtcttcttttgagaagtgtctgttcatgtcctttgcccactttttgatggggttgtttgtttttttcttgtaaatttgtttgagttcattatagattctggatattagccctttgtcagatgagtaggttgcgaaaattttctcccattttgtaggttgcctgttcactctgatggtagtttcttttgctgtgcagaagctctttagtttaattagatcccatttgtcaatgttggcttttgttgccattgcttttggtgttttagacatgaagtccttgcccatgcctatgtcctgaatggtaatgcctaggttttcttctagggtttttatggttttaggtctaacgtttaaatctttaatccatcttgaattgatttttgtataaggtgtaaggaagggatccagtttcagctttctacatatggctagccagttttcccagcaccatttattaaatagggaatcctttccccattgcttgtttttctcaggtttgtcaaagatcagatagttgtagttatgtgccgttatttctgagggctctgttctgttccattgatctatatctctgttttggtaccagtaccatgctgttttggttactgtagccttgtagtatagtttgaagtcaggtagtgtgacgcctccagctttgttcttttggcttaggactgccttggagatgcgggctcttttttggttccatatgaactttaaagtagtgttttccaattctgtgaagaaagtcattggtagcttgatggggatggcattgaatctgtaaattaccttgggcagtatggccattttcatgatattgattcttcctacccatgagcatggaatattcttccatttctttgtatcctcttttattttgttgagcagtggtttgtagttctccttgaagaggtccttcacatcccttgtaagttggattcctaggtattttattctctttgacgcaattgtgaatgggagttcactcatgatttggctctctgtttgtctgttgttggtgtataagaatgcttgtgatttttgtccattgattttgtatcctgagactttgctgaagttgcttatcagcttaaggagattttgggctgagacaatggggttttctagatacacaatcatgtcgtctgcaaacaggcacaatttgacctcctcttttcctaattgaataccttttatttccttctcctgcctaattgccctggccagaacttccaacactatgttgaataggagtggtgagagagggcatccttgtcttgtgccagttttcaaagggaatgcttccagtttttgcccattcagtatgatattggctgtgggtttgtcatagatagctcttattattttgaaatacgtcccatcaatacctaatctattgagagtttttagcatgaagtgttgttgaattttgtcaaaggccttttctgcatctattgagataatcatgtggtttttgtctttggctctgttgatatgctggattacatttattgatttgcgtatattgaaccagccttgcatcccagggatgaagcccacttgatcatggtggataagctttttgatgtgctgctggattcgttttgccagtattttattgaggatttttgcatcaatgttcatcaaggatattggtctaaaattctctttttttgttgtgtctctgcctggctttggtatcagaatgatgctggcctcacaaaatgagttagggaggattccctctttttctattgattggaatagtttcagaaggaatggtaccagttcctccttgtacctctggtagaattcagctgtgaatccatctggtcctgcactccttttggttggtaagctattgattattgccacaatttcagctcctgttatcggtctattcagagattcaacttcttcctggtttagtcttgggagagtgtatgtgtcgaggaatttatccatttcttctagattttctagtttatttgcgtagaggtgtttgtagtattccctgatggtagtttgtatttctgtgagatcggtggtggatatcccctttatcattttttattgcgtctatttgattcttctctctttttttctttattagtcttgctagtggtctatcaattttgttgatcctgtcaaaaaaccagctcctggattcattaatttttttgaagggttttttgtgtctctatttccttcagttctgctctgatcttagttatttcttgccttctgctagcttttgaatgtgtttgctcttgcttttctagttcttttaattgtgatgttagggtgtcaattttggatctttcctgctttctcttgtgggcatttagtgctataaatttccctctacacactgctttgaatgcgtcccagagattctggtatattgtgtctttgttctcgttggtttcaaagaacatctttatttctgccttcatttcgttatgtacccagtagtcatgcaggagcaggttgttcagtttccatgtagttgagcagttttgagtgagattcttaatcctgagttctagtttgattgcactgtggtctgagagatagtttgttataatttctgttcttttacatttgctgaggagagctttacttcccagcatgtggtcaattttggaataggtgtggtgtggtgctgaaaaaaatgtatattctgttgatttggggtgtagagttctgtagatgtctactaggtccacttggtgcagagctgagttcaattcctgggtatccttgttgactttctgtcttgttgatctgtctaatgttgacagtggggagttaaagtctcccattattaatgagtgggagtctaagtctctttgtaggtcactcaggacttgctttatgaatcttggtgctcctgtattgggtgcatatatatttaagatagttagctattcttgttgaattgatccctttaccattatgtaatggccttctttgtctcttttgatctttgttggtttaaagtctgttttatcagactaggattgcaacccctgcctttttttgttttccatttgcttggtagatcttcctccatccttttattttgagcctatgtgtgtctctgcacgtgagatgggtttcctgaatacagcacaccgatgggtcttgactctttttccaatttgccagtctgtgtcttttaattggagcatttagtccatttacatttaaagttaatattgttatgtgtgaaattgatcctgtcattatgatgttagctggttattttgcttgttagttgatgcagtttcttcctagtctcgatggtctttacattttggcatgattttgcagtggctggtaccggttgttcctttccatgtttagtgcttccttcaggagctcttgtaaggcaggcctggtggtgacaaaatctctcagcatttgcttgtctgtaaagtattttatttctccttcacttatgaagcttagtttggctggatatgaaattctgggttgaaaattcttttctttaagaatgttgaatattggcccccactctcttctggcttgtagggtttctgccgagagatccgctgctagtctgatgggcttccctttgagggtaacccgacctttctctctggctgcccttaacattttttccttcatttcaactttggtgaatctgacaattatgtgtcttggagttgctcttctcgaggagtatctttgtggcgttctctgtatttcctgaatctgaacattggcctgccttgctagattggggaagttctcctggataatatcctgcagagtgttttccaacttggttccattctccccatcactttctggtacaccaatcagatgtagatttggtcttttcacatagtccaatatttcttggaggctttgctcatttctttttattcttttttctctagacttcccttctcgcttcatttctttcatttcatcttccattgctgataccctttcttccagttgattgcatcggctcctgaggcttctgcattcttcacgtagttctcgagccttggctttcagctccatccactcctttaagcacttctctgtattggttattctagttatacattcttctaaatttttttcaaagttttcagcttctttgcctttggtttgaatgtcctcccgtagctcagagtaatttgatcgtctgaagccttcttctctcagctcgtcaaagtcattctccatccagctttgttccgttgctggtgaggaactgcgttcctttggaggaggaggggcgctctgctttttagagtttccagtttttctgttctgttttttccccatctttgtggttttatctacttttggtctttgatgatggtgatgtacagatgggtttttggtgtggatgtcctttctgtttgttagttttccttctaacagagaggaccctcagctgcaggtctgttggagtactctgccgtgtgaggtgtcagtgtgcccctgctggggggtgcctcccagttaggctgctcgggggtcaggggtcagggacccacttgaggaggcagtctgccagttctcagatctccagctgcgtgctgggagaaccactgctctcttcgaagctgtcagacagggacatttaattctgcagaggttactgctgcctttttgtttgtctgtgccctgcccccagaggtggagcctacagaggcaggcaggtctccttgagctgtggtgggctccacccagtttgagcttcctggctgctttgtttacctaagcaagcctgggcaatggcgggcacccctctcccagcctcgctgccgccttgcagtttgatctcagactgctgtgctagcaatcagcgagactccgtgggcgtagcaccctccgagccaggtgcgggatataatctcgtggtgcactgttttttaaacccgttggaaaagcgcagtattcgggtgggagtgacccgatttcccaggtgccgtccgtcacccctttctttgcctcagaaagggaactccctgacgccttgcgcttcccaagtgaggcaatgcctcgccctgcttcggctgccgcacggtgcacgcacccactgacctgcgcccactgtctggcactccttagtgagatgaacccggtacctcagatggaaatgcagaaatcacccgtcttctgcgtcgctcacgctgggagctgtagactggagctgttgctattcggccatcttggctcctccccaaggggaagctttttaagctttttattctaaggactattgaggtcatttcagtgatcaaagtgagatttattgttcactaatcgggctcctatgtgatcttatattgcatattagtgcagattttatataatttctattcacaacagctattgatgaaacaatgtttcccacatttttgtccttttagtgctaaaaattaaaaccaaagttaggggtatagaatttaggattatagaactagggatttgttggtccttaaatagctgggtgctgtttgttgaaagagtgattctactatgaaattgcatagcatgttgcaagttccatcataatataaagaaagttcaggatgtttaatattttttatagcatgataatcattggtttgtagcctgagtggtgacttctttcaaaattgagaaacacgcattgagcgtttacttagaaacagtcacagaaaaatggaaacatgatttttattaaactttagatgaaaaaaattaagcctttttttttttagtctcagatcagtaaaggtcaaactcaccatctgaagttagtttgtgtgtttttttctttctttttcattttttaaaaaagaaaaaatgtgtgggtcatcagaccccactcaataaaacttgctccattgattctaaaaaatggcatattaagaaccaggagctatattatgttatgcatatctcttggccttctatgggttatttttgcaaataaaagctcattggagggactggacaatcttgaggcaaccctcagaagtggtttgctttcctggtacaccaatcgtgttttataaagttgtcaaccatgagaccttattacagcaaagatgaaatggtggttactacaatccctgtaaatcatacttttccatggacatttctgcattcattaggggagcgaaaggcagtggttgaagtgtgctcatgattttttttttataggcttcttgatgaactgaggatgaagggttaaaactgcaagcaagccaaggccgtttctaggttttgagcccagtgatttcactatgtggtcttagaaactcacagtaaaatcaaagagttaatattaatttataggctctgccctgctttcatatgccagccctagttagcgacctcaggaagtgcagcagggtgaggcaccatatttcaaggttggccctgcatttatggcctcatttacaagccgcctaaaatcaaaacgcaacattgcatattccttttgtgcattataaagagactccttagcctcctaactcacctgggagatattcagatacaccccattcagagagaatgtggcttccatcagattagagactctgaaatctatgtttaaagatgttaagtgccctcagttctggaaccaactctttctcataataaacactgtgctaaatggatgtatggagatgtttctctccagcaaagataaggaaatggctggaagactgcgaaagaatagatgtgccactttggaagttggcataaaaatgaatgatatttttactttttggaaagccaagcaggtcccagagtcgtggggcagtacttggcctcatctctgaggccacccattctgctgctggcagccacagtgatgtacccttggcactatgtcgctccccctacttggcatcctcagtttttctaaactcatgggtgagagacgaatgacgtcagaggcccaaacctttggatgctgatctaaaagcatcaaccaaaacccaacacccgagcttcgtaagttcccatttgaagcaggagcagtttttatagcaacagacaaaggattgctctgtccttgttggaagtgcttgaggaccaagcacagaggtgggcaaagatcgtcatcagggcttctgctacctgtcttagccccagcattcttcaaaagagatcctcagggcagtgattctctgtgaggcacctgccttaagcccagatgctgaaaacaagacaggaactaacctcattctatgcccacttaacctttctaatagctttagcactgaatgactcatatgaacccattttacaggtgagaaaattgaggcctagagaagttttgaggcacatctgcttatagctagtgaaaagtgaattaaaactctgaactagtctcaccttatagccagagctatccatcatggtagcacgcagcatctaggtgagtttgtgctctggagagttcatgtttttcactgctcacagctcctgtgttctaggtggtacgtaatggtgaacagactgggcccgagattaagattacatgattggaagtgcaagttcatcacttttggagcaccttgggcaaatcacttgtccttcatagtcatttgtttctgcataagtaaaattgggataataataatagtggataatagtgctggctcatagagttattgggagttaattacatgagttaaatcatgtaaagtgttgagggcagtgcctaggcacgtagtaagaaatgtgagtgattactgtttttataaccttattgttaatgctaatttgctccagatggcatggtatacagtggtaacagctgatgacttctctccatttgaataaactgtgctaacttaatacagtggctctctggagcactacaggtctagccaaccctgcagcacatttaaggtctcagtttacatcacttcctccagtatctcattggccaaaccaagtcatgtggccaatctcatcatccatggaagggggatcatatttgtgccattaagtttcatgatagagagaaagagggattgaaaaccataactgcacccaccaaaaaagctattgtcttctttaagcctcacaacagcatcctgagaaaggtgatattggaaagacattatcttacccagttaaggataattatccctgtagaaaacatgaggctcagggaaattctgtggttgccaataaggttggcattggggccagcccttgaattcaagtttttcccactttacccagatgttatggtgagttacatgttatggggcaacagtaggtaaagcttttgcatctccataacacaacaattgtgactcacatttactaccctgacctatactagcacatgagttatctcatttactccccttgcagacgcatacagttggcctttttgttacttacaggcttattttacaggtgtggaactgaggcctcctgctctcaggcagccataaacttgcatgaaagccatgccccactgtgtttcttttctttttctagtaataggatgaggaaaacatgttttccctccatttccttcacatgaggatttccttgagtttaaaatcctgtgttgatagagatggtttatttagaagagcgttggcctccttcgaagaaaggtcctgcataaatttgaagtgttatggtgagatggtatcctggagacgtatgtgtgaataataaaaatgtcagcacctgctgcaaagaaccactgaatgaaaggaaaggaaaataccatacatcaaagaaagaggtttatttagattcaaagtcccctgggttaggaccacacctagtacactgtcacatccaataaatgttgagaagtgactgtctagcacatgagacacagttgtggagatgtcctaggcaggctccaccacagaagcaaaacatgatccagttgcaatggaaatccactctttgctcatgtgctttttcccaagtacttgcttattaacatataactctgctaatgaaccaaacacagggagttgctttctagagccgaaaaaaagggactgtgagaaaaagctagggtggtctaaggagtgaattagtgacaatgtcagtggatcaactcccaacacataggttttcagacagggaattagtctaggcagaagttcatcagacccagttcttagatgtctttggtctttgtggaagatgctgttggtgccctgttcgtgtactccatgggctcttactggaagcaccatggctcattcattatcagggggctttcttgagcacactttcttgcacaaggtggggcacaggctggcatttgtaggggaggtgaaagcccccaggagtgaccctcaatcaatctcagttgggaattggtggataagagctcctgcttcctggcctcccattgggacaactcagaggcatattctgcaccctctcccagaggcctctaatgggactgagacccagttacttacagaggaaacctgcttgtttgccatccctgtctattggctcctatcccttccttgtctcactcccctaatcctctcttccatccagtactgcatgggatcatctccccaggaaagtctcttgtttcagaatttgcttctggggggatgtaaactaagacagtcttttacaatctagcaaaaacctttctgctgtggaagttctgtggaaagggtcacagatcatgtgcagtcacacaacactctttggattatcactgtcatgaaggagcaatgggggagaccaactcctccacgcagggctcaggatgtgtgcatggtaggccaagagggcaagtgggtggggaggtggaaggggtcaggaaggaggcacagacaccgtcaaagcttaaggagaacggaccgttgacacatggaaatggatactgtgacacttagatttatcgtcaggcaaactgttcaccacaaacccaaagttcctctaaacaatgcctaggaaaatcttccagaagttttgaggatctggtgaccatattttcagaatcaaaagttgggaaccggtctgccaaaaaatgtttcctttatgatatgtgaatgtatcagcacagaaaaagacattagagagaatattgggaattgatcttgctccaaaaatactgagatctgtggtcaccagactcaggggtcatgtcatctgatttagtgtttctcagcagactgtatatgttaccatgggtcggggagtggtaagagcaaaagctgaaatcagaatatttaaaatcattgagattttacaacaaagcttacttgaaaaatgataatactataatttcattttcttaacttttaccataaaataattaagtgcatataaatatatatgtttataatgtaaaaaactagatattttatttctttggtggtgaaaatcaaagtctctgagtaactgaaagggtgtaggctatgaaaggtttattcactgatttaattcacatttattttaaatctatggataggcactatgcaagcccttgcaatataatgataaataaaacagacaaaaattttcaccatcattaagtttatcatgagggagacaggcatcataaacaaataagatgtaattacaaattgaaaggaactgaagaaggtaccaagagaatctgtgagattttttctttgttagacagaaatctagtgacatgtccaggacgaaacagtaaattaatggcaaagctaatgcttcaaccagtggttcctggcccccacaacaagagggcagagacgaagtacctagcacagtgtctggcacatagtaagccatcaaattttttaaattaattgattattttttatttaacttttattttaagtttgggggtacatgtgcaggtttgttacataggtaaacttgtgtcacaggagtttgttgtacagattatttcatcacccaggtattaaatctagtacccattaattattattcctgatccacttcatcctcccaaccccaccctctgataggcccagttcccctcgatgtgtccatgtgttctaatcatttagctcccacttataagtgagaacatgcggtatttggttgtctgttcctgtgttagtttgctaaggataatggcctccagctccatcatgttcctacaaaggacacaatcttgctcttttttatggctgcatagtattccatggtgtatatgtaccacagtttctttaattaatctttcattgatgggcatttgggttgattccatgtctttggtattgtgaatcatgctgcatgaacatacgcatgcatatatcttgagagtagaatgatatatattcctttgtggatatacccagtaatggaattgctgggtccaatggtatttctgtttttgggtctttgaggaattgccacactgtctcccacaatggttgaactatttacactcccactaacagtgtataagtgttcccttttctccacaacctcaccagcatttgttattttttgactttttaataggcattctgactggtgtaagatagtatctcattatggttttgatttgcatttctgtaatgatcagtggtgttgaacttttcttcatatgatgttagccatcaaaattgttaactccttcccttccattcccattttgtgagtcttcagtatgcagaatactgagaagagcccctggcatatgataagtgctcaaaatactagttactattattgttaatagtataaccagccagggatcaaaattgcagtatcaaaattagcagatgcttaagtcccttatgtaaaatgctgtagtatttgcatataacctaggtacatcctccagtatactttaaatcatctcaagattacttatacaatgtaaagttagctagtacaatgtaaatgctatgtaaatagctgctatactgcattattgcatggttttaaaatttgtattatttttaaataatacaaattttggttttttcctgaatatttttgttgtttttttcctgaatatttttggtctctggttggttgaacctgcggatgcacaacccatggacatggaatgcagattgtacaggattcagctcccattgagagacagaacgtatttcccaaagtggtggaactacagattcaatttctaagtgtatgacttcaagctcctggcattctcctggtttttcctctctctcctgttctctctccccctctcctattcccttttcctcccctctgatatttcttttctccttggaagagttaaatctattatctcaaagagttcttagtattctgcaactactgagctcttccagcgaatctgctatagggagtgcagttgatgaacagccccagctgccaaacctccagatccattgtcataaacactgaggccaccctttccccaggctgctcctagccaatgacagagcacagcagggatgttagaacctgcatgttcctgtcaatattcatgtattggccaacctttgctggggactccttgctgcactggctgagactttctcagaactacagtctaaagctcttcaaatccaactcttcctccttcccatttgctgttcttaggctcccaactgccttgttgtttgaaggctctctctgccctctcctgtcccccatctccttaatcttgcacagaatattttcccgtcaatctcctgcatgtctaatctaatattgtttcacagaagacctaaactatacagaacaataaaacaccttaagcagaggaaacaaaattcagtctaacatagatccatctggactaccactaagagcagcttagtttctccagatctaaaaagcaccttattatgccggatccagtctcttgtatggacttgagaacttaaaagtagatcagccagtccggcactgtggctcacgcctgtaatccccgcactttgggaggccaaggcgggaggatcacgaggtcaggagatcgagaccatcctggccaacatggtgaaaccctggctctgctaagaatacaaaaattagctggacgtggtggcatatgcctgtaatcctagctacttgggaggctgaggcagaagaatcacttgaaccagggagtcagaggttgcggtgagccagcatcgtgccactgcactccagcctggtgacagagagagactctgcctcaaaaaaaaaaaaaaaaaaaaaaaaaaaaaaatgtagatcagccaacaagatggtctctaagttgaaggcacctctaattgggatcctgagatcacctctcgtaggtaaatatttacaaactgaaggtcaaacacaaatgtctactttacaactactatactgcattcataatttctctcctcattttatactctgatgaaataccaacttggtcatttctgtgcattgtcaagagggtcgaagtcgaagcagaagcaagcagctggctggcttagcttatggttcctctggcacaggaaagtggtgagagtcattattcttattatccaggagttaacggatttttgcatgactgggctgagtgtatgtttattttctggcccttgataattactgtattcccattttcaatatgaatttgtttctatccaatggatcgtcaacagtagccactgtaattctttttgaggggctatatatgcaccattatttttcaaacttggctctgtgtggagatcttaacagaatgtagatactccagttgttccacatgcttgtcaacccttagcatggtctatattttccattttagtcattcacttcatttagtcattttagtcattccagcttcagtcatttgagccatgtccagtgtgttcacattgtggttctaatttgcatttccctgtggtatactgaggttgacaatcttttcatgtgcttattggccatttgggtgtcctcttttgtgatgtaccagtttgaatctcttggccatcttcctaatgggttgtctgtccttattggtttgtgggtattttaatatattctggcaagtcatttgtcatataaatgcactgcgatatccactcccactttgtagcttgcctttttattctcataatgcttttcaataaacagaaattcttaattttagtgtagtacagtttgtacagtttttccttaacacttactgttgtttgtgtcctgttaagaaaactttgtctatctcaaaatcatgaggatatcaaactctacaattaatttgttgtgtactgttctctttctctctgcatgtgtatacatacacatacacaccctctctctgtgtacatatatatgtatacataaaatatgggggcaaaaattttacataaagtcaggctgacatgggttcaaattctggctcttcacaataaccctataaggcaaatactattcccgttttacagctgaaaaacctgaagtcaggaggtcaggctaagttaatatgtctatggtcttatagctagtgggtgggagatgagaatgaatccagtctggctgaagagtccatacttctggcctccgtcatagcctgggcttcccaaagcttgtgcttttgttccttattggcaacaggccatcaactgcattcgttacgtaaggttattatgaggagtaagggagttattaaaagtgtctagcatggttcctaggacatagtaggtactcaaatatttttccctttctgttactattaacactttctttataaaataaaaattggccaggcacagtggctcgtgcctgtaatcctagcactttggaggccaaggcaggagggttgcttgagccaaggagttagaggccagcctgggcaccatggtgaggccccacctctacaaaaaaaattaaccaggcatggtggtatgtgcttgtaggtccagcaactcgggaggctgaggtgtgaggattgcttgagcccgggaggttgaggctgcagtgagcagtgatcacaccactgcactccagccttggtgacagagctagacgctcaaaacaaatacataaaatataataaaatgaaaattacaagagaccaaaggctgatgtctcttcttctttctttgcgtttggagcagagtaattgagtctttgtaatgacttaactaacactgagaaactccagacagatcctgaagttaacaaaacatgaatctattatctacttaaaatgactgcaataaaggcttcttgatctataactctagttttgcatgaagatcaacaagctttcacatggtaggtggagtaaatgtgaaggtgaacagtgtcagatgtgaaagatacagtgggattcttgccatacgctcttcagtcttaaaccttctgcaggtgatccaactacaccccaggaattaagaagcagattataaacctcaggcctttaaagggcaaaaaggtctgaattagtccaaaagttcagggcaaaactctaaatgacttttagttacaacggaaacccacttggaaagttgcttttcttctccaatagcttcccaagaaagggtacatggaggtaaaccctgagtctttgcttgcctaaaaatgtattatttttaccttcacccttgattatttgactgaatatggatttatcggttgaaaataacttcctttctagaattataaaggcatggttccattgttttcagattctttttcgagacaaggtctcttctgtcacccaggctggagtgcagtggcacagtcacgactcactgcagccttgaactcgcaggctcaattgatccttccatctcacccccctgagtagatgggactacaggcatgtaccacaatgcccagccaatttctgtattctttgtagagatggggcctcaccatgttgcccaagctggtctcaagtgatccgcctgccttggtctcccaaagtgctgagactacaggtgtgagccactgtgcccggccagtttttcttttattctctgtctgcttccttcatttctcaaaggcatctcaaactcagtgggcccaaaaccaaagtcaagctccatcagaacatcctgctacttccaactttaaaatatatcttaaatcacaatttcttgctacatgcaaccctttggttcaaactaccatcatccctcgcttgaacttagaattgattttcctgcttcagtatttttttaaatgatgaaatatttcaaataaaccatgtgtggctttatactttttattacataaaaaggatgaaaatctgccgggtgcactggctcgcacttgtaatcccagcacccatcccaggccgaggtggatggatcacttgaggtaaggagtttgagaccagcctgaccaacatggtgaaatcctgtcttcactaaaaacacaaaactagccggatgtgatggtgcatgcctgaagtcccagccacttgggagcctgaggcaggaaaatgtgctaatactaagaaaaaactgcaaagtactaagaactctttgagacgatagatttaactcttcaaggagaaaggaagtagcaaggagggaggaaaagagaggaggataagaagagggagagagagagcaggagaaggaggacaaaccaggagaatgtcaggagtttgaagtcagacaccagggagttgaatttctagttccaccacgtttgagagcttactgctattaggaagatagtcaaattttctaagcttggatttctccatttgtaaaatgagtgtagcaattttgttcacttggtcttggtgaagagtcaattaggtgacatgcatagaagatccagcacattctgcatggagcactcaggaaggagtgcttccctagttttcctcatgcaccacctctttttctttcttcatgacaatagcgcctgtgaattatagccactggctagagacagtaggcacagatttaatatggataaatgtgccatacagatgtacgtctgcagtctttgccttatttgcacttaagttgagggactgctttgtcattttcagttagggtggtctttgggaagccactcaacagccctgagacagacatctgatttgtaaaataagggtgctcttttctggttttcccacttcatgcacttttgcaggagtgaaatgcaatagcacacaaaggtgctttaaacagcagaatcaattgagcaatcagggctccatgtcttcttcttactaagcatttctcaagtatgttattgattgaatgcttcctcataagagcatatatactgataagtttttcttacaacaaaatcacaaaaaattactattttactgcacatttgacaaatcaccacacacttactataattgatacatcttctgaaatagacagtcaactcagctaagagtatgtggtatgtgtatataaaaacaactaaaagccaaattgcaaagaccatcgaggctaggaagaaactgcatcaactaacgagcaaaataaccagctaacatcataatgacaggatcaaattcacacgtaacaatattaactttaaatgtaaatggactaaatgctccaattaaaagacacagactggcaaattggataaagagtcaagacccatcagtgtgctgtattcaggaaacccatctcacgtgcagagacacacataggctcaaaataaaaggatggaggaagatctaccaagcaaatggaaaacaaaaaaaggcaggggttgcaatcctagtctctgataaaacagactttaaaccaacaaagatcaaaagagacaaagaaggccattacataatagtaaagggatcaattcaacaagaatagctaactatcttaaatatatatgcacccaatacaggaacacccagattcataaagcaagtcctcagtgacctacaaagagacttagactcccacacaataataatgggagactttaacaccccactgtcaactttagacagatcaacgagacagaaagttcacaaggatacccaggcattgaactcagctctgcaccaagcggacctaatagacatctacagaactctccaccccaaatcagcagaatatacatttttttcagcaccacaccacacctattccaaaattgaccacatagttggaagtaaagctctcctcagcaaatgtaaaagatcagaaattataacaaactatctctcagaccacagtgcaatgaaactagaactcaggattaagaaactcactcaaaactgctcaactacatggaaactgaacaacctgctcctgcatgactactgggtacataacgaaatgaaggcagaaataacgatgttctttgaaaccaacgagaacaaagacacaacataccagaatctctgggacacattcaaagcagtgtgtagagggaaatttatagcactaaatgcccacaagagaaagtagaaaacatccaaaattgacaccctaacatcaaaattaaaagaatggaaaagcaagagcaaacacattcaaaagctagcagaaggcaagaaataactaaaataagagcagaactgaaggaaatagagacacaaaaaaacccttcaaaaaattaatgaatccaggagctggttttttgaaaggatcaacaaaattgatagactgctagcaagactaataaagaagaaaagagagaagaatcaaatagatgcaataaaacatgataaaggggatatcaccatcgatcccacagaaatacaaactaccatcagagaatactacaaacacctccacacaaataaactagaaaatctagaagaaatagataaattcctcgacacatacaccctcccaagactaaaccaggaagaagttgaatctccgaatagaccaataacaggctctgaaattgtggcaataatcaatagcttaccaaccaaaaagagtccaggactagatggattcacagctgaattctaccagaggtacaaggaggaactggtaccattccttctgaaactattccaatcaatagaaaaagagggaatcctccctaactcattttatgaggtcagcatcatcctgataccaaagcctggcagagacacaacaaaaaaagagaattttagaccaatatccttgatgaacattgatgcaaaaatcctcaataaaatgctggcaaactgaatccagcagcacaccaaaaagcttatccaccatgatcaagtgggcttcatccccaggatgcaaggctagtttaatatatgcaaatcaataaatgtaatccagcatataaacagaaccaaagacaaaaaccacatgattatctcaatagatgcagaaaaagcctttgacaaaattcaacaacccttcatgctaaaaactctcagtaaattaggtattaatgggaagtatctcaaaacaataagagctatctatgacaaacccagagccaatatcatactgaatgggcaaaaactggaagcattccctttgaaaactggcacaagacagggatgccctctctcaccactcctatttaacatagtgttggaagttctggccagggcaattaggcaggagaaggaaataaacggtattcaattaggaaaagaagaagtcaaactgtccctgtttgcagatgacatgattgtatatctagaaaaccccattgtctcagcccaaaatctccttaagctgataaacaacttcagcaaagtctcaggatacaaaatcaatgtacaaaaatcacaagcattcttatacaccaataacagacaaacagagagccaaatcatgagtgaaatcccattcacaattgcttcaaagagaataaaatacctaggaatccaacttgcaaaggatgtgaaggacctgttcaaggagaactacaaaccactgctcaaggaaataaaagaggataaaaagaaatggaagaacattccatgctcatgggtaggaagaatcaatatcaagaaaatggccatactgcccaaggtaatttatagattcaatgccatccccatcaagctaccaagctaccaatgactttcttcacagaattggaaaaaactactttaaagttcatatggaaccaaaaaagagcccacattgccaagtcaatcctaagccaaaagaacaaagctggagacatcacactacctgacttcaaactatactacaagtctacagtaaccaaaacagcatggtgctggtaccaaaacagagatatagatcaatggaacagaacagagccctcagaaataaagcgcatatctacaactatctgatctttgaaaaaacctgagaaaaacaagcaatggggaaaggattccctatttaataaatggtgctgggaaaactggctagccatatgtaggaagctgaaactggatccctttcttacaccttatacaaaaattaattcaagatggattaaagacttaaatgttagacctaaaaccataaaaaccctagaagaaaacctaggcattaccattcaggacataggcatgggcaaggacttcatgtctaaaacaccaaaagcaatggcaacaaaagccaaaattgacaaatgggatctaattaaactaaagagcttctgcacagcaaaagaaactaccatcagagtgaacaggcaacctacaaaatgggagaaaatttttgcaacctactcatctgacaaaaggctagtatccagaatccacaatgaactgaaacaaatttacaagaaaaaaacaaacaaccccatcaaaaagtgggcaaaggacatgaacagacacttctcaaaagaagacatttatgcagccaaaaaacacatgaaaaaatgctcaccatcactggccatcgctaatcaaaaccactatgagataccatctcacaccaattagaatggcaatcattaaaaagtcaggaaacaacaggtgctggagaggatgtggagaaataggaacacttttacactgttggtgggactgtaaactagttcaaccattgtggaagtcagtgtggcaattcctcagggatctagaactagaaataccatttgacccagccatcccattactgggtatatacccaaaggactataaatcatgctgctataaagacacatgcacacgtatgtttattgcggcattattcacaatagcaaagacttggaaccaacccaaatgtccaacaatgatagactggattaagaaaatgtggcacatatacaccatggaatactatgcagccataaaaaatgatgagttcatgtcctttgtagggacatggatgaaattggaaatcatcattcttagtaaactatcgcaagaacaaaaaaccaaacagcacatattctcactcataggtgggaattgcacaatgagaacacatggacacaggaaggggaacatcacattctggggtctgttgtggggtggggggagcgggagggatagctttaagagatatacctaatgctaaatgatgagttaatgagtgtagcacaccagcatggcacatgtatacatatgaaactaacctgcacattgtgcacatgtaccctaaaacttaaagggtaataataataaaataaaaaaaccagcaaaaggaaaagaacaattaaaataaaagcattccaaaaattgagtcaaatttctttactgaatttctgaaagtggaatggagaaaagcagttaatgcaatatgctattttgttcattcaatgatttacaacttgtcacatgaatgcagccaaaatacttaaaaaaaaaaaacacataaggaaaaaacaaaaaaaaagtgaaaagcaaaaataagtaaacctcccagcttcagactggactgtcctctagggtgctaacacagtaagactggatacctccttagaccagtgcacagcatggtcaaatgcactgaatcccatccacaaagacagcctcattaactattcagaaaattgctattttgtgcttctaatctctgttaagacactgacaagaagtcattctagtcatgtgttacagacatggagatacaaagctcagattcgccttcaaggaaggacttgtggcccagatgcaggggtgtggctatcaggtgcctccagggtgtgtctcagctgcagagatcatccttcctagggtagcgtgcatctggtggctgagtgaaatggagaataaaagtcttgcagttccccctgatgcttgatgacttgcgcaatactcactctagaggtccctgtcatgatggctaagctttatcatgcctgtgtcaccattcaacagtttcttctgccagtcctgctttctctcccttcctttcacaagttttgatccccaataacatctatttaaaaaacatatatgtatatatattcagtgcatatatatatatatatattcagtgcatatatatatattcagtgcatatatatatatatacacacacacacatgcacatatatatatatgtgcatgtgtgtgtgtgtttttagagacagggtctcattccgtcctccatgttggaatgcagtggtaccatcagggctcactgtggcctcaaactcctggtttatgtgatccttctgcctcaggctcccaagtagttggggctacaggtatatgctaccatgcctggctaatttgtaaatttttttttttttgtagaaacagaggtctcgttatgttgcccagactggtcttgatctcctggacttaaaagatccccaagccttagccttccaaagcactgggactattggtatgagccacagcatccagcccctaataacatcttgaacccaaaactgtgtctttttgcctgctattagaaacccaacatgtctcacatgttattcttctaggcaggagaaataatttcaactattatcgaaccgtgatacccaatgcaggattttgctttaggtgctaatgatgaaagccagtagttaggcccaggggtttccaaaaggagtgctcatcctcaattagcatcactactagaaatggtcacaggggctccatggaagggatgggctatccccataggcaagagaggcagatgaaaccagcatctgttaaagggccagagcctcacacttgtttggtttgggctgagacaaacaatgttaagtgataccctaatcctccaatacacagttatttttagctctccaatatctccttgtattcaccttctgacattgagaatacttgggtgcagatatattaggtatttcacactaatcactatttaacaagctacccaatattcagtagaagttgggattgggatggaagagccagcccttcaccactgaaagctttgacttccctgataattttattaaaataaaagttggcaaataagttttaaaatgtaaatgaatggtaagttgggcagacacaattggttttctatccaacagctatgcctcctcccacatctttttgctaatacaactccagtatgagaggaaagtggctagatgtaggggattttgatttatctaaacctactgttcaatagataaacacatgtagccacttacatttcaattaatgaaaagtcaataaaattaaaattagaaatttagtgcttagtcacctagccacttcttaagtaatagacacatgtggctggtggctgccatatggaacatgtagatatgaagtagttctctcatcatacaaacttctattgcataagactggtctgaactaatcatggtgcctttctctactttgtcagcagaatttttcctagcataaccatggtgcatcaaattctggctaatcgcatgtaagagaatgtaatgagacagaattgtaggaaaggaaagccctttattttctgcttgagaagctgtcaggtaagaacatgatgcataaggatcatgctgacaaagggaggatgtcagtctggaagtaaaagagtctgggtccttgactgagtcattgaggggaaagatttgcctacctttattcctcattaactaaaaacttaatgtccttaagatttaagcctcagttctttgcgctttctcttacttgcagcttaaagcattcctaactgatgtttaagaagtttggaaaagaagactagaagagaaaaacttactcattgtccttcttcttttttttgccctatacccaaaataaaaattttcctttctatgtacaaatttgcacatagctatgaccaaatggtgtatgtacaactgtctttgttgtttttaaatctatcttttatcttaaaattaaatcatgtgttcattgcagaaaaactgaagaatatagaaaatggtaagggagaaaataaaatcactcagatacctaccaagagagaacaaatgttaacatactaaggtttctttttgtaatttttcataaatttgatgtcctttatacattgactttttaaaatgatcagcacagggttctattcctattttaaatggaagaaggtgacagataatactaccatcacgtgaattattagtcttactgccaactaaaaaaccaagtaaggatggattttagaggtgcaaaaaattatgactcacttcttttataatgagaatgaacaccagattacttatgaaactctgaaaaaccctactgaaaacatactggtttagactcagaacaattttaggaagcttacaaatattttttaccattaccacaattctgaacaagagagtatcctgttttgcctacagctgctttgtaattaagcttttctttttcttaaggttatgttcttattgtagtttatatgctttattgaaaacatcagaaccaaccaacactttgcaggaagttacatggacatactctcccaatttagatttttcttttaaaataaacagcaggactgtgtctgctttgttcatcactgtagtcccagggcttgcctcgcacgtgaactggaatacagcaggcccttaccagtgacccgtctggcagtgggagcactgagggagagcgggcaaagcttcatttcagtggggaaagagtttgaggagaatttcatttatttattttcttcaaaacattaaagggaagaactaaaaacaaaaaccagcaaacaaaataatatttgtgaaaagtgattttcaaaaatttccaaactgctgtggggtgatgagtgacacacatttccataaagtttctcattctatctgtgtctttcagtgtgaacaaaaaatttctttctaacatgtgaagattttactcacttcactactacctcctttagtggttggaagtcatttgaatttttctttacttttctagcaagaattctttgttttgtgctatgactcacgtgaataatagctcctggcttaatctgaagctctgtgttgtctctgccagcatgagacaggaagaccttctccacttttgcccagtaattttcattctccccccacagggctccacttaagcgagagtccactggaggatgacatgctgacatggtcacagccagtagaattctagagggaaagcatttggagcctatgccatttgaaaaacaatagttccatttgagaaacaaaagaaacacagtttttagcattttggaagaatgaaaatgtttgaagtggttccaagggctcctgggcccaggggagtcttacatgaagacacatctcttaatattgagccctcctgcaactctgggacatagctctccagtctgggatcagtttctgctctgtctggcaacagcctaccaagtctcatccaccagtttttcctgaggacaaggagcctcttaaatctgaactatggtgaagtgttttagtttgagatcccgggaaatagactctgagacaaagaactgtgagtaggaggtttcatggagagtgctctcaggatccacacctgcgaaataactataataataataataataataataataataataataatagtgaaggcctggactgggtagaggaagaaactgatccaaaacaaacgtgcaatgaggcctcagccaattcctggggggcagatctggctgtgtacagcagttcctgaataatgttggttcattcgatgttctttccttataacgttgatgagaaaacaattgatttgcacctggggccaccatctgtgtgtatttgcacaacctccccatagctgcatgggttttctctgagtactctagtttgctctctcattccaaagtcatgcacattaggttaattggcatgtctacatggactcagtgtgagtgaatgtgagcatgggtgtgagtgtgctctgccatgagagattgtcctgttcagggctggttcccacctcactccgtgagctgctgggatgggctctggccacccatgaccatgaactggaaataagcaggtaaagaattatcttacttggttttattaatctttcttaaatgtatgtatagttcacatttatttcaatgtttaatattagaaatgttttgcctttatttagaagtttggtattttgtgatcagaaatctgccataggaacttcattatagtttatatcaattagcctatggaaaaattgtttttgttatatgtcattttgcttaaagctgcagtttccaggactctatcaacaacattaagtgaggactttgtgtgatttgcggggccaagtgcaaaatgaaattgtagggtaccttgttcaaaatgcaagaaaaaagtgtcattagaggtacagaaacacactttttttttctatctgtggtgtctcaaattgttatggtggtgttattttcttctaaatgtctttttaaggaaagaaaaataaaaatttaaattattagcaacgatttttgccattcatctttatattatgcattgctaattttaaacacaagtgtgtttaattaacttgtatggcgactcaccaaaatatacattttgtattttattactcatgcgtgtataggtttttgttctaacaagaagagtaaaaacactgcacaaaactaactcaaatgattttatttcacttattgatatgtgcatattctgccaatgttctctacctttggcatactggtgactaacagagaactgaaaggaaatgtaactatctgaccatggttggctcatccagtgaactaatatgaataagagaggacatggtaggtttcccttgttgttcatgttttttagaatgccgttgccttctttctgtgtttggagtaagttccggtttggatgaaaagggtggcttctacaggctgtcagcattcatgcttactcagctgtagatgagatgctgattggtaatttgctttaagtcttgctgaactcccactcatcgtggatctactggagttctgtggccatggggcattgagacaataaaggagagcacctatgttgtgctatctcttctgctcacctgcatgctccattgtccccgtggactttacctacaaaatgcaaattcaaagataagattgttaaacatttcaagatggtgacagcagagcatgaaaccaaacccagggttcttctgagtgtgggatcttgcgaggttcctcagattgcgtgcccatgaagttggtcttgcttgggaaactctggagcttggatggcccttcagatttgcactaactgaagtaaagaggagctgggatttgaatacccacactaaccggtcaaagctgtaagccagaccctgggaggaagcataactctgggcaaagcagttctttatggtctagggcaattctagtgtggaatgcatccacttggagctgtcagtagcccacatttctcaaaactaggagatgggtacgtgtgctgcaaggaggagatatgggcactgcaccactacagtcactccatcaaggtccaggcttgccaacacagggagttttgacgtgagcaaaaacagctctttctactttgaaaagctctcataagagagcactaaggaatgaattttaaccctgtgattttaatatttttgttgcaatggtctttttgcttcacatgcacccatataccaacatgtgacagtgtatccagtggattcataattctatgccaggaactcctacagtctttgactttgctccccttggccattcaatcccagagctcctgaagttctgcaggaaaaccgtagggtacccacaagttatggttccttctgtgccctgcatatgcctatatctataaacctggacacaccacacaccagtcttacccttggatccagcctcagcagtttctctgtatcacagcaagcctgaatgtgattcttctttaaaattcttgcaacaaaagcagatggttcagtttcttattgagccaactcttaaagataacaaacatatatgtttaacattttgagtttttaatctttttttgtttagaacctctttatggaaacatgtctagcttactaaggtaaaattgactcactcattgactcatttagcaaattatttattgatctcctatttatcagacagggtggaatatagaaaaggtctctgcccttctggagtttctaacccagtgtggaaaactgataatacataactaaataactcatataccagtgtaattacagtggataagtgctaggaagaaaatgattgtgatagtaggtaaccaggaggggtgtacttggataactatcacctcttggatcttgactcctggcttgatctccctcttagagataggcaatgcaagtggttttttgtattagctttatttatttatttatccccccaggctggagggcagtgccgcaatcttggctcactgaaaccttcgccaaccaggttcaagtgattctcgtgcctcagcctcttcagtagctgggactacaggcgcatgccaccataccctgctaatttttgcattttcagtagagacagggtttcaccatgttggccaggctggtcttgaactccttacctcaagtgatccacccccctcggcctcccaaagtgctgggattacaggcgtgagccaccacacccagcctgttttagctttttaaagccttagtttcctcatttgtaaaacttcagctcatagtattcctgtgaggattaaatagcttgtcttagtttgggttccctcagaaacagaccttgacatgacaattcaggtttacgtagtgaatttgggaggtggtcccaggaaacgccagaatgagagtgggggagtgaggcagctgctgtaaggtgtgttaatgaccactgtgaacagtggggctaatcccactggagacctcatggggagctgggggaaggtagggcctgtaaactgcccctgggttgtctagagcctggctcagagttgtcctgctaatgcggaaagaagtttgcatatttatccaccatctcttatttattgttggttgagggtttctcccagaattgttaactccttgcacatacaacctgcccagtgagggcctgagcatgctcctgtagccagggaaaaccctcagtggagaactacaggtgctgtcggtaaggtgggttggcatgcatatgacaagagtgccatgggagcatggtggtagtattgacagtcagccaacactacaaacagccaatgcacataaagtggaatctgccccttagaaggtgctcaataaatggtagctatcattttcttgcatttggtacttgtcaatcatgttgttacacaaacgtgattgttgtgtaacaacacacacacacacacacacacacatcttattttacagcctatatttaagctccttgaaattcttttcaatatctaacattgtttctttccacagtgggtacttattggagtgactaaatcatttttcattttttttgttcctgttatttttaagtcaactttattgagacatttcgacatttttattgctttactatcatccaacaagttaactgttttatcttgacagcattctgtttagaaaagataactggggaaaaataagcctagaaaaatatgaaacatcagcttagcatttcaggaagcatagcaagactatctcattgtgtgctggcaaactttcatgttaatgctacttttttaagggaaatgttcatgggattttaaaaatcttgaaagtaaagataagatgtgttcattacacctagcaatggtggagaaagaactgagatgggcattcacaccccaacttgtatagcatgacatctctcttgttttgtcttcaacctttcctttaataagtgacagaagatcagtaaatgccttcaaaaatttcaggatttgggccacatttatttttttaaaaattctttttgcataaaatcaggatggcttaattcactgttaggccttggttggctgcccaaatatattcttcaaaattatatccatttcttaagtatgtctggagcagcatcaaaacggcatctgaagccaaggctagtgtgtttttgaagccttacacagaaaagatatctaaggatttcagctatgttgaagcaatatttctgtggagaaaatttgtatccaggctgacattttccatcctgggttttctacctgctgtgatgtggaatggccaagatatgaaatctctgaagtcggggttataacgcaactttactggcctccaagggcttgtggctcacagccattgttcacagatgccagatgatctaagaagatcatggaaacctggcacctcactgttttttggctaacaccaccaaagaaaattaattgttattgtttttggaaactgtcatccaatgcacgaaatagtaatatcagcaattatgttttttctgctttttctttttgggggaggttggggtgggaagatgatgaacactgtgattttattatagctgcccccagtggctggttttggggcaagaaaagggtgttacattcctgtggctgaaaaatcttatgaagctgtaaagcaaaagcgctcccctaatttgcctgagttgatgaaatacaatgaccttgagccttctgtctgattcaacagggtttgaatttctggtaactcctcgctcaagattggtttgctcattagtctgttgagagcacacagcctcgagtcaactaaaatctttcttttctgtcaacccactcttctcgcagccatgactcactccattctcctacctctgatactttaccccaagccacgatagttcttcttctcactctggccagtcatgaccttgaatctctttcttccttaaaaactgtagcccaaatttcatatccttcaagatgttattttggttcacccaaccatctctcatagacagcctaatacttccctcctactgtgcatttcttttgctttctgtttgtctgttagccacttctgtttgatgtttaagcacagtcccagatctaatcatccaaggtgctattgacacaaccagtgcagtgctcaatgcccagcagataaaaaagatactcctactgacagtgctagccaggggaagcaggagttcttttctcctaaggccacagcaagtggatgctaatgcttcgtaaggtacagttaatcctccatgtaactctatgtactgggcatctggaaagcctagtttttggttttgttggacacatgtcactttaggctgtgctacccaccatctgtttcccctacctaacaaccttgactgaattccttttgggaaattagccctctcccgtggtatttcttggaatgagggatatccaggcaactccctccaccatggatgcaggtggggtccctgaagtcccttcctccagctcctctttctcattgcctcagaaaaataagggagctagccaagagccctgcctgggccagagtctgacttttggcatgctgaatctctaacagagaggaaaatgctggatgttcctcattccaaaagcatacatgaggtgatcaattaattcctgctgtctagatgtctggcatttccctacatcctattcgcatcctgttttgtttccacttaattctctagtcttccatccaggctgtggactccagaaaatccctccaataaattcctgctgtattctcaaacataaattagacaaggttgcttcttgatagttgcaaaccaaagattcttaatacacacttttctctattgttgatttgctaagtaacagaaatttcaaaattagccaaggctcgagtttttcttcctcaaaaggagttttctatagcaggatctggcatttagaagtatgagtgagacaaaggataacattgtttgaattaattcaaagagtctacacaacatttgaggactacattgggagaaaacaattcagttttagaaaatcaaatccaagaataattttttggtttgcctttcttttggagtgcaggcttagaattaaggaggggtccaaaaattgcttgttcatttgatttgatggttgcacggatgtgtgaatagggaaatgctgtgcttaaaccacaggagtccactatgggggcactatgtcagggagagggacagctggcagtgatcatgagggaataggaagaaactacggcgtgtctctcacacaacaaatagacccaagaagccctgcaagaagccaaagagttctttcctcccagagctctcagtgattaaaatccacataggcttcagaattaggtcagttgtcttttaaggccgattagggttagagacccctgttattcccccctggtcctcttgacagagggtgcaaaaatatgccaaaggacctacaagctgcaaagacctctggaatcaaataagtacctgctcatgtagtttctgaaaatcccacatctgaacgaggaccaggactgctgcctccagggagggtttgccaggaaaaatactgcagggcctcagtgcaaacaggactgcttggcagagcctggtggatgcggtgcggcagctggccatgggcagtggagacgaggttgctggacaaacagcccaatgctgagacaaacatcaaacctgcatcactacctcatgtgtcacaagtcagctgggaaaggcactgggagcaatggattatttaagcttatatcttacagggagtggaggaaacgaagagacactgaacttgatgatttggctaattcggtgaaagaattaaaatatccaggtaaaaataaaacaaccacagtgaaattttatctggttattctccttcaaaaacctattttctactgttatctcacaaatgaaaattagggataattcttatttgatgagtgggctgtgttcctttacaaatttgaactctaaacgttttcctcaacaaccatttcaagcaggggaacatgtgtcacatattttgaactgtgcaaataattgaacaaaactggatataaacaaaaatggatagtagacacatagggacaatgaaagtgtcttgatgatacttgtgtgatattcggagagtccaagccaccatattgccagtcgtctctgtagacacccctgagtttcttgtaggaaaggaagcaacaggagacactgacttttctaaacctttggttattcaggggtatcacagggtgggggtgagatgggaaaagtgagatgattccgggatggagggtttttgagttacttgtctaagggcagaaaggaggcagcagctttcaaaggtatattccattacatttctcagctctattctggcttctttcggtaggttctcttgaaaacagaggcctctatccagagatggggacccaagaaacagagcacactattgggaaaaaaaatgtcccatataagagagtcaatcccttatttgtgaggatgaagccatttttgcatcaagttttgggtccagagccgatacttgtttacatctcagggctggctgaagattactttggaacccgtcctctaaccaggctttcagtatctgctattgtggagtgcatgtcttccctcttctcatgccctagcccccgttggacttggctgaaggtgcattgttttgcctctaggcctgaagaggccccaccttacatcttccaggggacacccggcaaagcctggaaaatcagtgtcagagagatcttccaaagctcaggagctgaggtggtgacaagagctggcaaaaagagaatgccactagatggagaatgaggtggagggagagcatcagggtcagtggtgtgcaggtaaactgtctctcacaaagccccccaaaacagcaacaaaacaaagtcctgatttgtggcatttgccaatttccacggtgtagatactcctgccatgaccatggcccatttctagctactgatggtttaacaccagctcacaacattcctaaatatttagcagttggctttctgagctagtagtagccatctccactggctcagtacccatgtacacatggactcaactttggtcaaatcactgcatcagtgatcttggaattggaaggatgccaagtccaagatgaatgaaacagaaaaaacacaactcaaacaaattcctaagtgccatggtaaagtgagaacagtgtcctctttctgaggtgacaggaacactctgtgaagcagggaaagagaaggaccagaaggcaggatatttggatcaaagatacagtgtaaaattatctgaaaaagtttaagcatcttgtatatgccctgcataatcactctacctttaccgattcatttgatttcaaaacagtcctataaaattgtcactattattattccccaattcgagagtaaagggttgatgttatggaatggggggaataattttgggagccttgaatatgcaccaccacctccattgtctacccactcccctggtatggaaaaaaagtctactcaggtttcagaactcagctctgtttcccctctgggagcctttgctgactgccttagaatatttgtattccacaaatagtctagtcattcaatgaatagaaatcatgaaggaataaggtaagagtcagggtaagagctgctataaaatttgacttctggtgccatctaaatggttttgtctagggagaaagactgagaactttggctcccattttataaggactttggtccttaccttgagatatcttaaggtaagtttcagactaaggtcactggttgaggggtgagttttaagtcccgctaagttgttcctgaccaccaattttgcaagataattctaggtatggtaatgcctttagagtagcccagaaaatgataatcttgaggaaagtagatgtaaaaatgcagctccagcaaaaagcaaaatcaaaaccaaaaccctaaattttgaaactccagcaacagaacacactataacaatacagaagcatggtagtgatgtagatactaaactattatttttataggcaaacacattcaaatgtttatacacaagcatgtttttttctctggcttatttccatttgtatttgtttgaggagtgtgttttggagagaaaaggcatcaggataaccagatacatgaaatgcctctttggcgaacagctgtcaggagtggacattcacacactttctcactcatggtaaagggccgttcagcagagacaacaaactgtgtgctcagaggcagcacgatggagctgccgttttgtcttcgtctttgcaaaatgtgtataaaactaaacaaatacagatgagcaatttaccaaaagataaggaagaatgagtgtgtgcttgtgggtttgaatacatgtttaggcatacacaatggctttttaatactttttctgcttttgtttatgtgcaactataacttttccattttcattgtctctcagctatcttttacccatcatgttatagttgaacccaacttcacaaacaatgtttgccagatattaatattcttaccaatgaaaatgagcttaaaaaattatgtgggcagagggcagaggaggccccactggtctgtaaccctgaattcaaactcacctgctttaaagtctctttggcctgaccactttcaaataactttctctgcctgctttggcctatatatcgtttccaaaatagcatgaaaaacttttctcattgtatttcaaaacgaaaaatgttccatctacatctggaaatactaaaaaatgtgctttcttacagtattttttttttactaggtatggacaaggttctgacccttattattggaactcaaatccagatggagtttggtaaggttctaatcatttgaagagtattcttttttgaagatttgtacatctttaggggaatttttactttaaagaagttatcatttgtgggaggtccattatgaaggttttaaatagtttgggggaatttctctttctttgaagatttctataattcagtgaaaacatttgccaactgagatggtcacatttctctactataagcctcttcttcgaatatgaattagattactcttttaatgtattggctgtaagtaggcttaaggatttttctttctttccttttctaactctggaaacaatgaaaagacaattcttgtgtttgagtgaaagtgagagttaaagatttaaagttgtacagggagacaaccaaaatagcaaaataattaatgcatatgttaatatcattgggtggaagattaaaatagcaatgatcaaagaaaaacgtggttcaatgtgtgacatttctttcttgtaacttattgtgtctttatggaagccttattgtgtgcaaataaaaaagtttcaaaggcagtttttaaaatgcttagttaaaggctaacatcagtatagtttaaaaggtaattgatctatagatgaactaacaactaccaacagcatctcttttgtcagtctatagctgacagatccctccttcttatgcctacaagtctgacatctactgaagtttcatagattggctgaaagcagtagtcaggaaaactttagtcccagttccagagattttcattctctataccatcagctctttggcaactggtgccttttaggctctgaattgacatgggttcaagggcatctcactctgttgaccttgtaccttgaatttcctcaacattttctttgtgatttgatatcaatattagttctctagctacctgcattacaatagtcctggggtccattcaacatccaaaaatatttagtaaacagctactatgtgccagaaattgtgctaggtgcttgagctccgaccccagaagaatgaaaaatgttgtgtgtcctggaggaccttacgctgaattgggagacctcagatcatgaacaatttggcaaatgccttgtgttcctcccattactcctgttcctccccttggccaacctctgattgcagttgcagttgaggaggacagtccaagcaggcgcagactcttcctctaccaggaagtgccttcacctcacaagggcctgcaggatgtcttttgctttcttccccagcagtgctacacccgtgggaggctgattagaagagaatagatagccatgacttctgtggcctgaaaaaccaataggagatgggaagcaggtgaatactacagcttctcttcctttaggggcacacctccaagaggcattctgtactctgatcacagaaatccctgcatcatcaaacccaaggtcttcagcagtgaccttgatcatgccctttcatactgttttctccttctctgcctctctcctgactcccggactcacttcttagacccgtaaatgacccctattcaagactttgtcttaggctctgctttaagagaaacctaagacaaagaacaacaacaagtaataattacataacataaaaggaacatgtgtaacttataggaaacaattgagcaggacaaggagactggggtgcagagggtggagtggaagatggctgattgcaattttaaatagagtggttaggagagaccccattgatcccacttttaccaatgggtataagtgacatttggacaaagtgtggaaaaagatgagtggttagcccaaaatatgtaaaaagactccttgggaggtaggggagatagtacaaaggccctaaagcaggattcttcctggcatatggctgcaggagtgagacctggagagagaagatgagagcaaagaggtagggaggcaagaccggattgcatagcactgccagaccattgtaaggactttgaggtagaagccagtggaaagttgcagactcagaaactcccccaacagaggctgggctggtcaagtgtgtccagttcccttccaactttccattacagcaaagagatcgcataattgtatctccttatttgatgtctggcttcatcctttcatctgttaaatagaaatggcaattcttgttatttaaatttgtgagaaaggctgatttttgaatctctatcttcttggtaagtaattaatcccaaacctcttgtttccatatctaaggaaagttaccagatggaagagctgagattctttttgttctcaaaagctgtttgattgccaagcttctaacaaacattttgtagcatgacaatctgttaacagaatgctggatgatagccccaaatggagggagacagcatcttcaggaatactttatcttgtagacttcagatatgcttcctctttcgctaccttagtatctaatgaagtacaagagcattagtgtgttctagcatttactctttcacatgctttgattgctcctactgaaattttaaactttaatttatgttagtgttaatgcatcactagcttgtggcttgcttgatgtgttgtggcattcacgtttgttcttttctgatggattcttttttttcaagtgcaaaatataacatttacttttgtgtaacaatcttttgagaagtcaaaagtacccaggattgtacccagaagcgtaacagtagaagagttctgtgatgccaattacatctgtaacttaccatgtcactcttctacttttgttaaaagatttttacttttttatctttgttaaaaacgcttttaagtgagtgtatgtttcaatacaatttcatattggaaatgatgatcacaaattatgcatttaaatatgcagatttcatatgtagaaaagtgctctgtctagtcagtgtgaataagtcactgagctttggattttaaaaagctaggaggctgagggttctcaggtgacctattctcaggaattaaggaactagaacgaggctggaatgaatttaaaaaaatgatttactttctggttctttttcatgtgttgttaaagcacaaaatgatgttggtgaacctagataaggagatttgtaatttgtattttcctgggaaataatctatcccttctacattttaaaatgcattgatatagggtcctccatagtatttgcaaataattttaaaatttccatatttgtaatttgccattttaatttttctaatggtgttaacttatatcttctctttttattttaaaatttgtattgatacataatatttatacatatttatggtattcatgtgatattttgttacatgcttaaaatgtgtaatgatcaagtcatgatttttagggtatccattacctcatgtatttatcatttttatgtattgtgaacatttcaagtcctcttttctggtattttgaagtatgaatatagtgttgttaactatagttaccctactctgatatcaaacattagaacttatttcttctatctaactgtatgttcgtgcccattaaccaacctcccaccacacacccttccgagactgtgacatctatcactgtatgctctacctctatgagatcaacatttttagctctcacgtatgagtgagaatatgtgatatttgtctctttgtgcctggcttaattctattccatccattttgctgcaaataacactattttgttcacatttttatggccaaatagtgctccattgtgtatatatataccacattttctttatacatttatctactggtggacatttaggttgatttcatatctttgctattatgaatagagctgcaacaaacatgaagcacaggcatcccattgatatactgacttcctttcctttagataaatacccagtagttgccagattgttagttccatttttagttctttgtgaaatatctgcactcttttccatagtggctgtactaatttacattcccaccaacagtgtgtaagaattttcctttcttcaccttcttgacagcatctgatattctttgtctttttaataatagccactttaactggggtaagatgatatctccattgtgattttgatttgcatatctctgatgactagtgatgttgaacattttttgtttgtctgttggatatttgtataacttcttttgagacaggtctatttatgtcctttgtccactttttaatggattatttgtttaatttttttcttttactgtttagttgagttcctattatattctggatattagtcccttgcaggatagcttgcaaatatgttttactatttgacatgtttcctctttgttaatcatttcctttgctgtgtagaagcttttagtttaatatagcactatttgcctatttttgttttatgtgcttttgaggtcctatacataaaatctttgcctagatcaatatcctgaagtatttcctctatgttttcttctagaagatttgtgatttcaggtcttatgtttaggtctttaatccatcttgaattgatttttgtaggtggtgagagggagggtgaaatttcattcttctgcatctagatatccaattttcctaggaccacttatttaagagtgtgtccttccccagtgcgtgttcttgagcctttgttgaaaatcagttggctgtaaatatgtaggcttatttctggcttctctattctattccactggtcgatgtgtcattttttataccaatagcattctgttttgattgctatagccttttattttgaagtcaggtggtataatacctccagttttgttcttttagacaaggattgctttggctatttgggctcttttttggttttatatgaatttcaggattatttttaataatcctataagaaatcacatacatattttgataaagattgcattgaatctggagattacttgagcaatatgatcattttaatgatattaattctttccatccatgagcatgggatgtctttccatttgtatcctctttgatttctttcttcactgttttgtgattttccttgtagaggactttcacctccttgggcaagtgtattcttagctatttttttggtagctattataaatgggattgcctttttgatttctttctcaattagttcattattggtatatagaaatgctactaatttttgtatgtttattttatatcctgcaactgtactcaaattatttattagatttaagagtttttgttggaggctttagttttttagttttttttcagatataagatcatgttatctgcaaagagagacaatttgacttcttgttttccaatttgaatacctttaatgtctttatcttgtcttattgctctggcttggatttccagtactatgtcaaaagagtgttgaaaatatatatccttgtcttgctccagttcttagagtaaaggctttcagcttttctccatgcagtatgatgctagctagctgtgggtttgtcatatatagcctttattatgttgagatatgttccttttgtgcttagtttgttgagagttttaatcatggagggatgttgaattttatcaaatactttttctgtatctattgacacagttatatggtttttgttcattttgttgatgtgatgtatcacaattattagttagcatatgcttagtcatcctggcatccctgggataattatctgatcattatgtaatatctttttaatgtgctgttgaattcagtttgctagtattttgttgagaatttttgcagctatgttaatcagggatattggcctgtagctttctttttttgttacatttttgcctagttttggtatcagggtaatgctggccttgtagaatgaattagaaagaatttcctcctcttcaacctttaggaatagtttgaggagaattggtattaattcttctttgtaagtttgatagacttaggcagtgaggctctctagttctggacttttcttttttttggggggaaagcttttattattgattcaatattgttactcattattaggctatgtaggtttcctatttcttcctgattccaccttggtaggtttccaggaatttgtctattgcctctaggttgtctaggtttttaatgtattgtggttcataaaagtgtatgatgatcttttgtatttctgtgttatgagttgtaatgtcttctttatcatttctgattttctttatttgggtcttaagttttttcttggttagtttagatagtggtttattgattttatttattcaaaaaatcaactttttgtttcattcatttatattttcttttagtctccatttgcctagttctgctctaacctttattatttcttttcttctgcaattttggatttggtttgttcttgcttttctagttccttgaggtatatcattagactatttatgtaaaatatttctacttttttgatgtaggcatttattgttataaaatttcctcttggcactagttatgttgtatttcataggttttgtatgttgtgtttcaatttttgtttgtttcaagaatcttttatgtaattccttaattttttcttgacctaatggtcattcaggagcaagttgcttaatttccatgtacttgtatagttcccaaagttcttgttattggtttctagttttattacttttattaataattttttattactagttttatttattatttttgtcttagaagatacttatgatttcaatttttaaaaatttgttgaggcttttcttgggtcctaacatatggcctaccctggagaatgttccatgtgctaatgagaagaatgtgtattctatagctgttggatataatgttctgtaaatatcggttaggttcattcagtctaaagtgaagttcaaatccaatgtttcttttttaatctctgtccacataatctgtctaatgactagagtggggtattgaagtctcccacaattatcatattatagtttttcactcccttaataatatttgctttatatacctatatgctccagatttgagttcatatatgtttagaattgttaagtcctctaaattgatccctttatcattttataatgaccttctgtgtctctttttactgattttgacttacagtgtgttttatgtgatataagtatatttattcctccttgcttttcatttctgtttgcatggaagatctttctcatccctttactttcagtctcagtgtgtctttatgggggaagtgagtttcttgcaggcagcacattgtttggttatgttttgttacctattcagctaatctgtttcttttaagtagcatgtttaatccatatatgttcaaagttattattaatatgtatgggcttattattttaattatattaattgttttctggttgttgtatatatcctttgttctttttttcagttattgtttataattgtggttttgtgtttttttgtagttgtaacatttgagttatttatctttcttacttgtgtgtttgtttttccagtgacttttatacttctgtgtgttactatgtagatattattcttttgcttccaggtataggactcccttaagcatttcttgtacggccagtatagtggtgattaattctctcagcttttacttgtttgggaaatattttattttttcttcatttatgaatggtagtttttctgagtattatatccttgcctggcagtttttttttcttttaatactttgaacatatcatcctattcttttctaacctgtaagatttctgctgtgaaatctagtgttaatctgatgcagcttcctttataggtttttatacacttttctcttgctgtttttagaattctctgtttgtctttgtcttctgacagtttgtctataatgtaccattgagaatacctttgtggttgtatctatttgggtatctctgagcttcctgtacctggatgtctaagtctcttgctggacctgagaagttttcagctattattttgttaagtagattttctatgcctttgaccttctcttcattttctgtaacattcaaaaatcaaatattggtcactttatggtatcccatatgctatctaggcattattcgttcttttttatttagtttttaattcatttttgtctgatttaatgatttcaaaagacctgtcttcaagttgtatgattttttcttctgttcgatcttatctcttgttgaagactttgtatttttaatttgattcaagaaattccttagtttcaggatttttctctggttcttttttataatacctatctctttggtaaattttcattaatatcttgtgttgctttttctgacttctttgtattatttatctgtgttctcttgtatctcacttagctttttaaatatcaatattttgaattctttttctggcattccatacatttctttttcattgaaatctattgttagagaattattttattcctttggaggtgtcatattttcttgcctttttgtattagtcatgtatattgatatcagcatctctggtttaataataacttcttccagtttattgaatttgctttcatacaggaaggctttttttctggagatatatctatggtgttggtttgttagggcactgattctgggtgtatgcagtagtgtcatctccatataatgtttttggaagtaaacagcatcagtaatgtctgtgatttccttggtggcttgttagtggaggatgttgtgaaatattgctggggatgagaatgtctggtacccagtcctcaggccccagtagtggtagtggtgggatgagcatgcctgtccttgtgccccagggcagtgtacactgacattagtgttagtgggttcaggaggactgattcttgggcctctaggcagctttctcagagtgggcagttgggcaggtccttgggcacctggactgtaggtgtggtgtgggtgattgaagtagcattagcatgacaaccctctgcctcccatgcagactatgctggtgttcatggtggctgcaaaggctgggcatgccagtcaccagtcccacaggtggcatgtgtggatggatgtcagctgtggtggtagcaacaggttggatgaacctgtccttaggcctgttggaggagtactcatgcaccaatggtggttgatggggaagatgattcccaggcccccacacagcatgcttgaggatttggtgggagtggagctgggctgggttggtctgttttcagcaccctcagtagtgcatgtgggcactggctatgggggacaaaggatgggtatttcctaggcccctggcagtgtacttgagtggaagcagcagcagctacactgtggtcctattgctggggaagcgggggttgctttcagtgtcagcagctgtaggaaggtggctgggaaatacatgcttccatcctaggtggtggctgtggagggagaagcttgtcttttaggtgcttgtaaatgtgtagtagcatctatgctgggggttagggtcactgccaatcaggcatactttgatacctgatgtcagcagcctgcagtggtggcagctgtgggtcagggagtctgtttttaggacatgtgaaaatccatggtagccccactgctgggagctacagatttgcagccaatcaatggctcattcttcagccctggccattgctgtagttaggggatatcacagggatccagggatatggagatacaggggctgagtcatcaatacgatggtgtgctgtagctgcttaaagcccacagcttgtgtgggactcagcaggaacttctgttctgatgtaatgctatcgtgtgatgcccagacatcttcttctgttactctcagggcttgagagggtagatgggctctctcatggctaggattgctagagttgcagtggaaatgtggaccactggggctctctcacttataatttctccacttggggagctcctctgggatcccagcttatcccagctgagcaggctacttcactttgctcctctaccttgccttaggtgttccctgtcacttctctgttgaattatagtgttctttcttagatgatctattcaaagtgtggttatctactcactatttttgtttttctctgtgcaggaggtaccagatgcctctagtcagccgtcttatagcccctcctatatcgttttaatttttgtattggtcaaacttgcaaaaggttgtctactttgttgatgttaaaattttttcgttttatcgaattttgattttgtaattcacacttcaggcttttatatttatccattctgtccttgtagcttagttggatttattttgttgttacttcctgtgcttctttgtttgacgtattagtttacttatttacatccccaccagcaatgcacaaaagttctaattcccccacatcctaccaacacttgttactttctgttttgttttttttaattataaacatcctagtgggtataaagtaacatctcactgtggtttttattttatttgtattttcataatgaatactgatatttagcatcttttcataggccattggctatttatgtatcttctttggagaaccatcttttgaaattttttgcccatttttattgttttattttaattggtgaattataagaattctggatactctggataccagatacttgtcagacacatgacttgcaaatattttctccaattttgtgtttgtgttggttgtgttttcatacttgtgatagtattctgtgacacacaagaatttcaaatttttacaattcaatttatctgtttttcattgcttgtacttttggtgttatatctaagaaaccattgcctaatacaagatcataaagatttacatctaagtttcttctgaggcttctgtacatattgctcttatatttagatcctagatcaactttgtattcatttttgtatgtggtattaggtagggttcaaatttatttttttgcatgtggatatccagttatcccagcattatttgttgaaaagatgattcttttccaaattgaattgactctattattgataatcaattggctaataatatgtgggtttatttctggaatcttaattctaatccattgatttttatgtctatgcttacaccaggagcacactgttttcatttttgtagctttttagagagttttgaaatcaataggtgtctttcaattttgttcacctttttaaaaataattttggttattcttgagtttgcacataaaatttggaatttctgaaaaaacaaaaactgagatttttatagggcttgtattgaatctttatatcagttttgggaatattgtcatcttaacaatattgagtcttccaatccatgtatatggatgtcttttcatttatttatgtctttaaaattttttttaaataatgtcctgtagttttcattaaatatcttacacttctttggtcaaatttattcttaaatatattataatttttgatattactgtaaatgatattattttattttactttctgattgctcattgctattgtatagaaatttaactgatttttttgttgatcttgaatcttgcaaatttgcttgaatatttattagctttaatagttgtgttttttggtgaattattgaggatttcatatgtataatatcttgtcatctgccaatgcagattagtttaattcttcttttccagtttaaatgacttttatttctttttattgcctaattagatagaacttctgtttaatgttgaatacaaatgatgagagtggttatcgttgtctcattcctgatgttaggaggaatgctttcactattaagtataacattggccgatcacagtggctcacacctgtaatcccagcactttgggaggccgagttgggtggatcacctgaggtcaggagtttgagaccagcctggccaacatggtgaaaccccgtttctactaaaaatacaaaaaaaagttagccaggtgtgatggtgtgtgcctgtaacctcagctactcgggaggctgaggcaggacaattgcttgaacccgggaggtggaggttgcagtgagccaagattacaccattgcactccagcctaggagacagagtgagactctgatccccaccaatgacaaaaaaaaaaaaaaagtataatggtagctgtatgaagtattttagatgctctttataaggttgctatggcagtttccttttattcctagtttgctgagagtttttatcataaaagattgctgggtgatgtcaattttgttttactatgtttgttgaaatgtttatgtggttctttttttattctagtagaaaggtatatttccctgactgatttttttttatgtcgaacaaaccttgcactcctgggataaatcccacatggtaatggtatgtaagtttttcttttaatgcttctggtatgtaagttattcttccaatttgttagcattttgttgagtattttttgcatgtatattcataagagctattggtctatagttttattttctgagattttttttcttgttttggtataaagatattagcaacttcatagaataagttatgaattgttcctctttttttttttttttttttttttttttttttttgagacagagtcttgctgtgtcgcccaggctggagtgcagtggcgcgatctcgactcactgtaagctccgccttctgggttcacgccattctcctgcctcagcctcccgaatagctgagaatacaggcccctgtcaccacgcccggctaattttttgtatttttagtagagacagggtttcaccgtgttagccaggagggtctccatctcctaacctcgtgatccgcccacctcggcctccgaaagtgctgggattacaagcattagccaccgtgcccagcctgttcctctcttttatgtattgaaagagtttgtggaggattggtgttcattctttaaatattcagttgaatttaccattgaaaccatggagtcctggctaaacaagcctggggttggttttgttgaaaactttttgattgtaactcaatagcttttcttgtcatctcctctttcatttgtgatgttagtaatcctgtcactttttttcttggttgatctagctaaagatttatcaattttgttgaccttctgaaagaatcaatatttatttttgttgatttgatctattgattttgttttcagattatttatttatttctgccttaatctttattttttccttccttctgtttgctttgggtttaattttatcttattttctaggttttttttttttttttggtggtaggctggttattgatttgagatcttttttttgttttaatgttgtttatagctgtaaatttctcttagtattgccttcatggcatcccataagtttttgtatattattttttattcatattatggtatatcctaatgactttgactaagaggttgcttagaaataatgtttaatttccacatattggtaaatattttaaatttctgcctttgattgatatctgatttcattcatttgtggctgaagactatacattatgtgatttcaattattttaaatgttttaggatttgttttatgacctaagataacatactctggagaatattccatgggcacttgagaataatgtatattctggtgttgcttggtgaggtgttctatagatgtctgttaggtctatattctggttttgctgggtggattgttctacaaatgtctgttaggcctagttggttcatagtgtcatttgagtcttctattttatttcctattttttgtctggttgttctatgcatatgcattactgacaatgaagtacagtttgatcatcccaaatccaaaatccagaatctgaactacttcaaaattagaaacttcttgagtaccaacatgatgttcaaaggagatcactggagcattgtgaattttgatacttttgggtttgtgatgcttaaccagtaagaataatgtgaatattccaaaatctgaaaaaatctgaaacttgaaacacttctggtccaaagcattttgaataagggaaaatcaacccatattaaaatggccaattaatattgttgaattgtctattcctctgattctgtcaggttttgcttcacgtgttttggggctctttagttaggtgcatatatgttataattgctatgtcctcttgacaggttaacaattttatcattataaaattttcttctttttctctcattacaacttttgtcataaattctattttgtctggtattagtatagccacttcagctttcttttggttactgtttgcatagaatatctttttctattctttctttagtaaaaataaaatctttcggccgggcgcggtggctcacgcctgtaatcccagcactttgggaggccgaggcgggcggatcacgaggtcaggagatcgagaccatcctggctaacacggtgaaaccccgtctctactaaaaatacaaaaaattagccgggcgaggtggcgggcacctgtagtcccagctactcgggaggctgaggcaggagaatggcgtgaaccccagggggcggagcctgcagtgagccgagattgcgccactgcactccagcctgggcgacagcaagactccgtctcaaaaaaaaaaataaaataaaataaaaataaaaaaaaataaaatctttccatatacttgtctttgcatctaagatgaatctctcatagattccaatctctttattagaatgttttgtccatttacatttaatataattacggatgaaagaggatttactttttccattttgctgtttgttttctatacttcttacatcttttttgtttctccatttctccattcctgctttttcttgtgtactagataatttctagtgtaccattgtaattcccttgtaatttattttactattttttcagttatttttattatggttgtgctcatgattacaattaacatattaatatatagcaatctatttcatattaatgccaactttatttcaataagtttctgccaagttttgtatatccacttatttgttgatggacgtttgagttgtttctaccttttgactttggttgataaggctgctatgaacattgtggtacaagtatctgtttgagtctttgctttaaattcttttgagtgtatacttaagagtgaaatttctgtatcataattctatgtttaaaaacaacaaaaatgttattttatacagatctattccccctttttatactgttatgatcagaaattacatctttatatctttgtggccataaacataaatttttaattattgctttatgcagttgtattttaaatcagacagaaaaaaataattacaaagaaaatttatactgtctcttatatttacctggataggcaactttgttggtgttcttcattttttcatgtgaatttgaatttcagtcttgtgacctttcctttcaatctgaggaatttcctttagtttttcttgttgggcagttcttctaattataaatgccttcagtttttatttatctggaagtgcctttatttctttcatttttgaaggataggtaggtataaaattcttgactgacagtattattatttcagcattttgaataagttgtctgattgtcctctggccttcataatctttcatgaaaaatcagctatttatcttattagggggtcctttgtcatgatgagttgtttttctcttactgcttttaagattctctctttgtgtttgtcttttgccagtttgatttggtttgtctaggtgctgatctctttagctttattctatgtggagtccactgagcttcttggatgtgtagattaatgattttttaaataaaatttagggatttctaaattagagatttctatttagccattatttcttcagatactctttctgttactttctctctctattctccctttgttattcttattatgtgtaagttgttatgctggatggtgtcttatagttctctaaagctctgctcactcttttttattctttttcctatcactcaggctacattatgttattttttaatttttaaaatctaattattttttaattgacaagtaataattgtacatatttacagggggtacatagtgatattttgatacatataatgtatagtgatcagatcaatgtagttcacatatacatcatctcaaacatttatcatttctttgtgttgggaacattcaatatcctccctctagctacttaaaactatgtattattgttaactatagtatttgtgactattactttgtgtttgaaaataatgcatgctctttctttgctacattcaggaatctacatatgtcttaatataatgtttagtcatataggctctagctttgcacaggtgtgattccttttaaattgttgctatctgaaaggaatgtttaaaagttttcctcagcaattgtggatttgtcaatttttcttttgatttatataatctctgttttgtatactttagtgatatatgattcggtatatcatgattgatgattgtagcatattttataaatttcatctttgatcaatatgtgtcattctaaattattttatataatgttattttgcctaaataacatttatatagttcctctttgttgatatacacaaatgaagttaaatatatattgaattatatatgcatatatacatatataattttaaaatttcacttttgtcattttgtactaaatatatctcttataaatattatttaactaaatttttttgtctatgtaaacaaaagcagaacatttctccttttgaataagtgagtttacctaattcccaattggttttgaaaagtctaaaacaaatttttgtttgtacattcactctctccatttttaaaccaaaatttctattaggtggatactggaatttctggctctattgtaaatatattctatcttttatgtcatacttttagtcttttggtattttgtcatctgttccatgagcattcctgggcgtcacattccagctcactaattgtctctattttgttaagtttcaaaaattgtgataaagtatacataacataaaatttacaatcttaacaatttttaagtgtaaatttcagcggcattgagtgtattcacagtgttgtaaaactatcatcattatctattttcagaactttaaaaatcatcccaaacagatctatgtacctgttgagcaataattccccattctttacacccctcagctcctggtaacctcgattctacattgtctctacaaatttgcctattctagggtacctaatgtaagtagaatcatacaatatttgtcctcttatgtctgtatattttacttagcataattttattaaagttcatttatttttaatcatatattaaaattgtattattaagactgaataatattccattgtaagtttataccacattttgttatccatttatatgttgatggagatttgccctgggcatttctctgttggtagttttttgattactgattcaatttccatataagttatatgcccattaagattttctatttcttcatgcatcagtcttggtaggttgggtgtttctagaagtctgttcattttgcctagtttatgccatctgttggagtacaatttttttgtaatgctcttttataaccttttttgtttctgtaaaattggtagtgatgtccccattttattttagattttggtaatttgagacatttttatttcttagtcaatctagctaaaggtatgttaattttgttaatctttttgaagaaccagactagttcattgatgttagctattgtttttctatcttctagtttatttacctacactcttgcttgaatagaaaccacttaaaatgttcattttctttttttcacactttaggagaagggcctgtaaattactatctgtggatcaaatcttgcctgccacttgttttgtaaataaagttttattggaatatatgcatgctcatttgtttatgtactgttttcatgttgcagtggcagagttgagtagttctaacatagactgtatggcttccaaagcctaaaatatttactattttgctctttacaaaaaagtttgctgactcctgctctaagaagctttcaaatagatttatatctaaaatgcagcaatggccaaatttatagtaatgatttcttttgccaggaagatggaaggttttcttactgtaaaacatttgcagattttaatacttctctctgccatgccttgtttaacagacagataggcatggagaaggcaccatgtggcagtaagggaggtgggtgctaagggtgtatcacaacactgggaagcatattccttaacattaggagtttatgtgatttagctgaagagagaacacctgtattagttaaaagggaatatttagcagcatttaaacaaaagctatttcacatgtcactaagtatactataagaatttccagaaagaagtatcatcctttgtctaatagttcagaggatttctattagtaaatgaaaaatgacagcctcattttatcctccaaatatgtcaaaattatcttgagttgttgggtaccagaactgataggtgtcatgtatttaagcccatttgaaaaatacatttcaataatggagtgagactctgtctcaaaaaaatttcaaatgtcttttctcaattgaaaaaacctattatttctagatagataagtaaataacctttgcaaactcgagccacacttttcccctttcttttaaaattcagcttaatataattgaaaactgaagtctgactctccaagcctataagggataaaagagagacaggatagatagaaataactggcaacgaggagttactgggctttggctccatgggagacaatagtggtttcatagaaggcaatggtggactcttagtcaactgaagcttgggtggaacttagctgcataattaagaagctgaatctgttttattttatttttctataacataaagagtgtgaaaaggtcattttaatgttcagagagtggcttctcttggaaaatatccccgaacataccatggagcagtgtcaactgtagtataaaatgtcctagaaatcttgcaatttatgagtttaatggcacacctgaggattacgaggttttttccgtccactcataatagcccggtgactgatttagcagagaggaagcaaaatgaacaatcttgatcaccttttaacatttttcctgtcttgctgacttcagagctttaggggtacagcatttgcaggaattgtatgtctttttggcaatactttaaaatcaaactcaaaagatgaagaagaaaaatggttattagatagttataaatatgtcattatttgcaaatggtattgctttgtggatatgaagctcttcattgctcatctgtttttaagttcaacgatccacatataaaggtgtaaggacttattgacattgtgcttcctctctgttgacaccattagcccgagaactaaggacaatggatagctgtatataagttcaagttctgcatctacttcttagtttccctttccatccttcagttgtgtttgttttttttttgaaatctgtaaagtaggaataataataaagttactattctttgtagggttttgaaggattttcttgagataatgtaaagtaccaggcatataattagcctaaatgtaactcaaccgtgtttttttattttaatatacatgtcactacccatctctagtgcagagaatcaacagaatacaaataattttgaagattcatataatattcacacgttgcaaaatcttgtttgtggagccctcattgtagcctgtatgattcaaacgatgccacgtagtcctttaaacatttccagatattaaggaattttacactgttgtgtcactttttaaatgtctgcatttttctgtctctctctctctcaatctctctgaatttgtttatccagtgaataaaattaggaagaagtggatgctgtaagaatatttatgtgtttaaaggttgtggttgccccattatagttacttaccagcagcttcagcacgcagtcagagactgtagaaaaaagaatcattcttttctctgatttgaggatgcatctccagagtgtttctggggtaatggatctaaaatcaaaattttaaatgctagtttttaagtgtgaatttttcttcagcacttttgttctctccttataaccttttatttcattgagttccagagagcagacagcttaggtttcttgatttggcagatcaatgaggaaggataactaaagaaagtttaaaggtatcttttataccaaaatacctcacttctctttcattgcaggtgtagttaaaagcactaatgccataccctagttttctcacctctattcttattatacttgctttctatgcttaagatggcaattaacttaaatatctgagttcatgtagttcatctagtagataaacagtatcagtgctacctggatgtatttttgcatcacttatttgcatgatagtgttcaaaaatttttgtgaatttcaaccacagaaaagacataatagggcaattctcaaaggaaaatatagaaatgacccagtacaagaacagtaaaatatctttccacctgttaatttggtaaagatcagaatgtgtgtgttatggtttgaatgtctatgaccctccaaaattcatatattggaacttaaaccccaaggtgatgatattaaatggtatggtctttgggaagtgattaggctgtgagggctttgccctcataaatgggattaatgtgggtataaaagaggaatcagagagctgcctggcttttccatctcttctgccatgtgagggcagtgtctgtctctttccctttctgccatgtgaggacacaacaagaagtcaccatcttgaaaacagagagcagccatcaccagacaccaaatctgccagtgccttgatcttggactgctcaacctctaaaactgggagaaataaatttcattatttataaattacccagtctgggtatgtttttaatagcagcatggatggacaaagacagtgtgtaacactcagtatcaacaaactccaaggaaatgggcaccctgatactctattgtgtagtgtaaattcacacaaattttggagagcaatttggcaatatatatcaaaatcttaaaaaagttctaggcacaagaaccctgttttagaaattaagtctattggagtagtctgcaggaagttgtgtctgtaaatttgtttatcacagttctgtttatactggaagataaccctcaagaaatgttatatatctaataatagaggattacaattacatgatgaaattttgtatagacatcaaaattatattatatatattatatattatagaaaaataaaaatgtttatgaaatgtgaaggaaaaaatatcataggttataaaacagttttccttcaagcccatttcggttaaatttatatatttatgttatattctgtaaatatttatattgaaatgtccacagtaactgtatataatggaagttgcagtaatgctaacaggttttcctgacttatctatatatttttcaatttgctacaataaacatatattttttctagatggataaacaaagctgcttttttattttaaacaaaagagatcagtaagattattttattttccaatcagattctaagctctctggggcaagattcagcttatgaagtatcagataacaaacataatagataaatctttgtttttcagctatgtggattatttttctaaagcagtctggatgaattttttagggaaagatcaactctttaaaaaatttacatttttcttttgttgaataagaccaatagcattgatgctattataaaagataaataaaaaccacagaaaaataaacttggttgagcctgttgggaaaacatttatggacaaactatattttcaaagagctttgactaacatcactttaaatcttaaatctttcttgtccttctgggtgttctttcatgaatgaaaaaaacagaaaggcttaaaaaagaaattcctgctcaccatctccctaaagcaccatctcccttgctgctttcggttgactctcatcagttcctgagttctagctaaaaggtgcttcttgaatatttctcaaatttttaatattcctgaaataagattatagggatgcaaatgattttctcaacaggtattacctagaagtctactttctaagtataatgtttgggttagttgcctgagaacaggatggtgttttctatgccctgggcatagaaattttatcaatgagagaatctggctgattagcttgagcttattaatattggtgagcatttttaggtttggggtagcttattttatggttcttttgcaaggaaattgcagaattacataaatttttgtttattgtgtctctggctcttcttgcagttgggacttcacatcattggaaggtgaatagaaaagtatgtcttaagaatttcaccatgttttggaagaattgcagcaagaaaaaaagaactcctttgtttccaccccatttcttttaaggaaaacctggaatatctgagggtgcaagctgagaaaagtctgcttatctgttccctactctggcaatcaaaaaggatccaagtctactgttctcttctcctggcactcttaacttgcacacattgcaaccttttatggcaaagtaatggtcaagctatcctaacaaggacgagcccttattaaataattcactgtggttgggaaatggtgaggaagccatcttcttttgtcttcttttctctgaaaataaaattttgtctaattttgtattaaggacatttgggcttcactttattacattctctactttctttaatagctcgaagctcatgacagtacatgtctggtcttgcaaaacaagatgaatttgttaaattaaacttttaaaaaaaatcagtgtaactggccatctttcattataaaatattttttctctcaattcaagccaattgtgtggggtatgtgtgttgtgtgtgtgtgtgtgtgtgtgtgtgtgtctgcctttatgtgctgcctgaaagccatatgtccttcctcaggatagaatttttaattctaggtaataaatctcaaacttttgagaactaaactggaaatgccacctctgacttatcaattgtttctggcctgtgcttctacaaaacacacagcacatattttctaaccataattgaaaccattttaaaatagtgtttttggaggagtgaatctatgtgaaacttctgtaagctatttgtaggacagccgtgaaaatcctccatgttctatgcattggattttttttcctccttactcacaaggatcatcttcaggttaatatcacagaaattgggacaacttagtgttcgagaaatagagaaatagctcaaggagctattagataccaacccataccatgttgttttctgagggtgggagaaactagaagaaagtttgacattactctcattccatgagacaacctcaagaacacaaacccaaactatccaggtaggacttttagtttagggagaccaccaaaagaactggagcccatttcctctggtgattcaacaagattaacagcccctcctgaagtttttgtccagtggcctagaatctaaatatgtgctcatacccagttctttgtcttcaattcccgagtcttctgtgtgactcattctgaaagtccaggtgtggaagggagaggcgcatggaggaaaaagccaggctcagaatttatatttgtttaatgccacatgttcccaaactatttctgggctgtttcaaaaactggtctgcacagatattaatctctgtaaccatatgtctgaaacatttcatcactgggaaacagctgaaagtagttggtgaggctctgtgggatccatgttaggtattgtaagtatggtcagaagaagagcctgtatctggagcttatgggaaaataatgagaaatgcctgtacctcctctttcttatttttgaggttggctgcatgactacagttgttaggcccaggtaagtttattcccaaagagtaagggttgggatggatggtatgtgtggattatctcaggcaggagatgaggtcaaatgaagttttcctggaatcatcttgttaaccaggtgtattattttttaacccaagtcatcacaacaacaacaactttttttcatatcatgttttctcaaaagtatattatgcaaataaaaatctaaaacaagagaaatacaccatacctaagatcacctcttattccatataagtaggactagtttttaattggctcttccaaatgtttgatttattttgggagggtggtcataaaaatgatacatacatacctttaacattttcatttaacataaggcatgaaactatgcaattattttccaatcttttgatgtaaggccaacctttactttgaatgggtggtagctgattgaagttctactttgtgtttcttgcaaaaaccacaccaataatatatcttctgcaatttccagtttgggtttctctgaagcaaagcaagaattgaaagctgtgtgcaaaggcatcagagtgcagaatcttcttgtattttgtacaatatgtataccaccccaactttaattgtttctggcataactaattcaagttattttgacagttcaaatttatttagtctctacaaaacattcaattgttcatagataaaatgctcattttcttttcctactcaaatttcatcaatgtgtgccatatttaattaaacttaattacaatagtataaactacttggaaataagcacaatacttgtgagatggatgtagggggcctcaggtattagagagtagttgtctaaatctctgcattctgaacctatgggcatcagtcagtgtgttacagaggatgggaggaattagttaacttcatgaatccctaaagcaaacgtcaattaagatgacgtatcctgtaggatggactaaataatgctgcagcaaggaatacttcccaaattgtcatggcttgcgataagtcttatgtttttctcatgttttatgtccattatggatcttgccctggtacccagcctgatgcagcagctgctctctggatcatgcctcatcgctgtggcagagcttattgcaaatgagtaactctacctgggagtgacacataactccactcacaattcattgtccaaaataagtcaatgaccacacctaacttcagtgggacaaagaaacactatcctactctgtgcttagaaggaagaaagatgaaaatatttggtgatggctctatgactaccatggatagcttttattttaatattgtacattaatagcgctctctttcagtatacttacaatcagtatgctaagtgattgctttatagtataacctcagtgaatgccttaagacaaccttgccaagttggtactatcatgcctattctacagatgtggaaatgaaacacacagaagataaatacttgccaaagatggatcagcactaatcacaacttgagctcagtagtttgatgccagggtggacgttctgagcacctatgctttagcttcctctcataagggaggagaatgacagctggaccccagtagacacgtatttgagttgatgataaagtcagctacaatgctgggctcagctttgtcacaaaccatcccaggattttctctgtaagatggggctagcattactttgctctactatttgccccacagataatttaagagtcattttctctatgccataccagccttaaatccaagacctgcactgtccagtacagcagacacaagccccatgtgaccactgagcacttgaaatatggctactttgaattgaggtatgttataaaatatactcaggatttcaaagaattaatatgcaaaagcagtatatctcactagtaatttttcgtattgcttatatgaatgacaagtgtacatatattggattaagtaaaatgtattattaatattaactttagctgtttttaaaaaaaattttgaatgtgtataaatatttcaaaattacatatgtaacacatcatatttcttctttttttcttgagacagagtctcgctctgttgcccaggctggagtgcagtggcacagtctcggctaactgcaacctccacctctctggttcaagcaattccctgcctcagcctcccgagtagctgggattacatccacatgcctccacacccagctaatttttttatatttttagtttcaccatgttggccagactggcctcgaactcctgatctcaggcaatccgtctgcctcggcctcccaaagtgctgggattacaggcatgagccaccgtgcccagccttaatttttcacttcaatagttttttgggaaaaggtggtttttggttacataaataagttatttagtggtaattctgagattctggtgcacccatcatctgagcagtgtatactgtacccagtgtgtagtcttttattcctcgccctcctcccatccttcccactgagttgccaaaatccattatatcattcttatgtcttttcatcctcataacttagcttccatttaaaagtgagatcatatggtatttggttttccatttctgagttacttcacttaaaataatggtctccaattccatccaggtcactgcaaatgtcattatttcaatcttttttatggctgagtaatattccacagtgtatatataccacattttcttcatctagttgttgattgatgggcatttaggctggttctacttttttttttttttgcagttgagaattgtgctgctatatactgcatgcacaagtgtctttttcatataatgacttattttcctatgggtagatacccaatagtgggattactggatcaaatagtagttctacttttagctgtttaaggaatctccatactgtttttcatagtggttgtactggtttacatttccaccagcagtttaaaagtgttcccttttcaccacatccatgccaacatctatttttttttaattttaaaattatgtccattcttgcaggagtaaagtggtgtctcattgtggtttcagtttgtgttttactgataattagtgatgttgagcattttttcatatgttccatggccacttgtatatctgcttttgagaattgtctattcatgtgctttgcccactttttgatggtattgtttgttttttcttgctgatttgtttgacttctctgtagattctggatattagtcttctgtcagatttatagattgtgaagattctctcccactctgtgcattgtctgttaactttgttgattatttcttttgctgtgcaagagctttttagtttaattaagtccattctatttgtctttgcttttgtggcatttgcttttgggttcttggacatgaagtctttgcctaagccagtgtctagaagggtttttccaatgttatcttctagaatttttatggattcaggtattagatttaagtctttggtccatcttaagttgagttgatttttgtataaggtgagagatgaacattaagtttcattattccacaggtggctagccaactatcccagcaccatttgttgaataggttgtcctttccccactttatgtttttgtttgcattgccaaagatcagttcactgtaagtattaatatttggctttatttctcagttctttattctgttccattgttctatgtgcctctttttataccagtaccatgctgttttggtaactacagccttgtagtatagtttgaagttgggtaatgtgatgcctccagatttgttcatttgcttagtattgctttggctatgtgggctcttttttgttgcatatgaatttcaggattgttttttctaggcctgtgaagaatgatgatggtagatgggaattgcatttaattcatagattgcttttggcagtataattattttcccaatattgattctacctgttcatgagcatggtatgtgtttccatttgcttgtgttgtctatgattactttcagcagtgttttgtagttttccttgtatagatttttcgcctccttggttaggtgtatttctaagtatttgatatttttgcagctgttataaaagggattgagttcttgatttgtttctcaccttggtggttgttggtgcacagtagtgctactgatttgtgtacattgattttgtatcctgaaactttactgaattcatttatcagatctaggagctttatggatgagtctttagggctttctaggtatataaccatattattgatgaacagtgatggtttgtcttcctctttaccagattggatgccctttatttctttctcttgtctgattgatctggctaggacttcccatactgcataagcggtgaaagtgggtatccttgtcttgttccatttcttagggagaatgctttcaacttttccccatttagtataatgctggctgtgggtttgtcatagatggcttttgaggtatgtcctttctacgccaattttttggagggttttattcataaagagatgttgaattttgtccagtgttttttcggcatctattgagatgatcatctgatttttgtttttaattctgtttatgtgatatatcatatttactgacttgtgtatgttaaattattcctgcagccctcataaaacacctacctgatcgtggtgttttatctttttggtatgctcttggatttggctagctagtattttgttgaggatttttgcatctatgttcatcagggatattggcctgtaactttcttttgttgttatgtcctttcctggttttggtattaggtgacacttacttcatagaatgattcagggatgattctctttttctctatcttttggaataatttcagtaagataggtgccaattcttctttgaatgtctgatagaattcagctgtgaatccatctggtcctggaccttttttttggttggcaattttataattattatttcaacctcaatacttgttattggtcagttcacagtttttatttcttcttgatttaagctaggagggttttatatttccaggaatttatccaacttctcttggttttctagtttgtgtgcataaaggtattcacagtagccttgaatgatcttttgtatttctatggtatcggttctaacatctccagtttcatttttaattgagcttatttggatcttctctcttcttttattgattaatctcactaatggtcaatcaagtttatttatcttttcaaagaaccagctttttgtttcatttttttttgtatattttttgtttcaattttatttagttctgctctgatctttgttatttcttttcttctgctgggtttgggtttggtttgttcttgtttctctggttccttttcagtagttaggggttaaattaaactcagaaatcagtctatgcataccctgacctcagagatgatgctgttccaccacacctttgctgggcttgcattctactttggaattccacgtcttgagaattatctctttaatggcaaaagtgccaataagcctttcccaattttctccattgtgaaagtaacatctcttatatcataatgtatataatatccatgtcaatgtattttgggtgtaaagggtgaaagttaggaagtatccagttggaattctgtgtaaagtgcactgaatctggggaggcagagaatgctctacttacaatagctttctcctcccccaaactatttgccttccgtttaattcctcagcaccttctctctttatcccaggcttttgctcgaatctgccatcttttcaattaggtaaagaaatctggacaaatatttccaatccgtcagttccggaccctctggatggtcagtcagggagttgactacaatgatctagttgcccaggggcctgctctgcccttcttgtcttcacggctgcaaatgaagtgcccctgtgggcccctagcatgtgacaaaaggacctcatctttaccttggtgacacattgccttataaggatgtctagggtctccatttgctgacagcctacacagtgggggaaaattgcttttcagaacatgactggcccctacaaaaccaaatggcaactctggcccttgtttgggttttgtgttttgagctgcatgttggattagccagctgcttcttcaactctgctccctctgtccgtcttttggataaatctgttagtccttcagaccacacaagtgaaaagggtacttgcaaataactcccctgccctctgacttcactttaacagccctccaaggagataaggtcgcaagttcactgatggcaggaaaggctcgctgcaggcctgagcgatctcacacatttactgtgccattcccaattcataaagaagccacagtgccttaagagcccaacgacttttccatgtgtttggtatttttagttctaagcactgtcttcagtgcgtctccaacatgtgtttgagaatgacccagtggtcccatattaagataattattttaactgctgttttgaaacaccatagcagtgtaccaagaaacttcctacccagcaacctgcacagttggttaagcaaaaattgatccctagttaatcaaatgaatctaataagttgtagataaatacatgatttcatcacctacagtatgagcacccaaagggaaataagtgacctcactaaaggtgttgattcttcccataataaatggtgcagccatatgcgtgtgctcagcaacccatgatctcacaaggcatgctgctataataaactgaaacaatatgagtatgcaggagggaaaatgctacccatagcgagcatgactacctggaatatgtcttaacagactaaaacataaattagcctctataaatctcattgcttgttgcttcactgacatacatgtcctgccaaaatattacattcttgaaagagctgtataagtagattaaatggtttttgtccttgggaatgtggaaacctttatttgttttgttaagagacttttaaatatccttaggttatgcctcaaacagatgtccagggtaaatgctcctgacccatttaaacatttcttagcttgaattaaggtccagtttctgcagcttgtgtatagttcgactcactgggcagcacctgacaaaactgtgaggctggtaatgctaggcttgatggctctatggtgtgacttttaatggcaggactgaggaaactaagataaattaaaacctaattgggtatgttaacagttttagcagtcttcacatatggatcccatgaggacactttaaaagatgttacagtttagctcctgttgcaaggcttagctgcagaatgagacctgaacagttgtctttccaatccatttcacagggttgagtttcttttgatattagacgttgtatttactgagtaaaaagtcacatttgctcttcatccccaactggttcagtatataatgagggggcttaggatgtaaatgtcccaatatgaaagccatagaacattcatcagaaggggggattcctatggtgatggctccatgctagaaagtgctcttcaggcagagatttcaaggagtctcagttgccttaaagtaagggcctccattgctcacttgcagtcagagtggctctaatctgcagactctgttctgtaacttgagctcacatcgcaaagaaaaacactctctgtgtgcctcacaatgaaaccaaaattaatgctatttgagtattcaaccaactctagaccctatggtctttctgtcattgctagtgtccattccactgacttggagtgagctgaagaaggcaaatgatttagccaaagctttttttcagggtcttcaaaacagattccttcaaacttcaagtaagagttcagtgtcaacagagcactgatgcctatgtaaaaggactgaggaaggatctgaagaggtcctttgttcttgcaattaagaaagagactgggaagtgacttattggtgtgtttggtgacattccctaaatgtaggttttccatggctgatagaattaactcacaaatcttgtttcttataaaagactccttgagggtggctgatgcagagtttcactattttttctatctatgaattaaaagctctctgagtttctcctctgatttacctgaagaacgtgaggactatagaagtgaaatgatgtcttaaccagcttgaattcacttagggctctgtaagtagcagagcaataataatgtccactaatagagattccaaaagttcttttagaaagtacctactaagggcaaatttatacaattgacttgagttagctggagatgtctaatattgtgaataatattcttataaccattttgcattaccaagttttttggcaaaattgaaattccctagttgggtagtgggtataaggtttttcagaactgctatatatttgatttttagagtcaactttcacatttgtctcaagagatgagaaaatattagattaaactaatgaaagcgtttttatttcaaatatgaatattttgcatagatttattgcacatcattgcatcaaatattaacttagacattgatgaaaaataccccttccttcctccttcctaatacatccttaaacagtgtgcattaaaacgtgaaaggaaatagagtatgcaagtacatgcatgtgtgtacttcgcacactgttatctattttaggctcaaatagatgtatctatggttgagaaattcccattaaatattggggcgaggttcagatgctgtagatatttgtttacattttatcaaatgctttcttacatgtgaacccctcaatctctgagaaatcacctaagggaagccatggatctgcctcctccaggtttcattattgcatggaatgtgaggggatttctgtcttaattaatgcataagccagctcttctgagtttgggtggatatccttgaggagaaaggtagctaaaattagcagcctctactctcttctgtgttccttataaaaaaaaagagaaactgtctcatctttaagaatggaccagttatgaacttccaacctttccattaatgctttgaagcaatgatggtgctggctgatgtgcttaagtaggaccattaaatttgggaaataatgagaggaaataaacagaaagagtaacttgaaactggacgatcctggcttagaagatatgacttgttcttaggtttatttaccttttctaggattttgggaaaagagaagggccttgcagagcccctcttattaataacccctgcccaacccccctacttttccagatcctttccctttctaaggagaggtcctgcaggacgcctaccagagccatgcatcagacagtggcttctgcccagtcacggctgggtgggtgtggccagcttatgggaaagttcacgtaagaggttgatttaatctctccagttttaaaatgtggaatggtatggtctgaatggctttgaattagaataaggtctaaactgatttgagagcaaggcctggatttgaaagggagagtgatgaaatcaaagaatgtcagagccaagtaatgttagagatttaacaagaactgcatgtattccctgttatgtgcatgtaggtatgagtgtatgtgtgttatgagtgtgtatgtgtctatatgtatgtgtgtgtttgtgtctgttggggagagaaatgggataaaaaggatcagaatctcacgtagacttttcctaagtcattttccccccaaagtctcatttgtccacctctatgaaacttacttggctgagaactgctgccaaatgatccattttctaatgtgttagtaatcactacatgaatcctcttgagaaagagctgggccaggagaacttaatgacttccaaggtcacacagcaaatccagggccgagcctggttccccgctcctgttccaggctcctcccatgccaccacatcatcaggcttgacatatgttcgccttttctcctttggatctcagctcacagggacatccacagccagatacgaattatcacctgaaggcattaattttttattattaacttgataccaaaggaaacacatgtaaaaaagtgaatgctttgttcctaagtgcatttctctccataatttcagtgagttctgtgtgggtgacagtttttaataaaattcctctccagctgctcatatgagaaagtctagaaacattgacctttagtcactggatgactgagctgtttactctggctgtggacgaggtttgggtgtagagtcctctgtcttcctgcctgtgctggagtgggataatttggaggcagtgactcaggcttctgtggggacttacttagtataacaacttttctggggctaggaagaccacttataatattttccaaagagggcaagaaaacaaaatttcatgggaaattttaagaatgaaagttttgtgcatgtgagccttggaaaactatgcacaaatagtacccattaatttctgttttctttgtgtaattgagaattcatgtaacaacttactagctgcacatttggtgaccccttatgttaatagctgcttttctgttcttttggaatggagatcacattccacctgctcttggactgggtcattccatgatgtctcaatagatgatttgtttcccacttccctgcaccacagcactggcctcctcttcacctacctaccctttattttgccttctccaatccactcttaccctggaagctaggattgtctttctgaaataaggatatgagcagctccccattggttttagaatctagcccaaactcatcatgactcatggggcctgtgggatccggccaccatcatcacctctggcctcatctagccctgctgtctccttaccctgtgtgagcttctgtctttctggacaactctctgtttcttggacttgccaccttctgttagaacgttgcctgtagctctctttcctctctgagcctagccacagcagattgcttcgctggtccagttcttcatccctccctttattcatatgtgggcaatggcatcagcatgagcagagtacatttctctgactcttggctttgatcatgaacaggtgagttgctttcgtcaattgtatatgggtggaagtgatagtgtccaagccaaagccttcagaggttttgaaggtttccacctgcactgctgagcctctgccatcactccaagcagaatttgtcctgggaagctgctgccccctcactctgtgacccagaatgaacccatgtgcagaagagaagccccgaccttagtagggtgacagcatcagttggacccatagcttaaagcagagctgccaagcagaacccagcctacgtcagccaactagctgatccccagccaacctgaggacacataagcaataataagtgttatcttaggccactgagttttgaggtagttcattacgtagtcaaagtcaatgaatatgttggccaatgctgactttgcaggttgcagtttgaccacctcatttttgctaggaaaccttcttggatctacctccatgcctctcttaagtctgtgatgattgccacttgtatgtgcccccatagagaacttatccaactctattgtgtctttcctccagacaaaggcacagatctcacctgtcttatgcgactgcatctctgaacagtttcttcattcactctgcaaatctctcctgagcatttgccaaattccaggcattgtcttaggaagtgatgtacaaagctcctgcttgaaggaagctcacattcttctgggaggaacagggaaaaccacacaccgacacacacacgcacaccccacagtagtgaaaaaggaaaacaaagtaaagaggaaaagagctctggagaaatgttgctttgttgttttggatggggcaggaaggaagactgactatgtgaacactgatacagacatgttgctagtttgatggctgcggatacaagcaatttctttccccattgcctctactttctcgctgaaataagaaagcacaatcaacagtgccccgcctgatgagcaatgcatcgaatgaatgagtaaatgggtttcaagctcagtgcaaagcgtatccatgcaggttgaaaaaacatgaatgtggacataatgacagagaggtgagtgcactgattcttgagggggcattaaaaatagccatgcacttgtagctaatgaagaaatgcattaaaaaactccttaggtggtgaaagaagagataggagtgaataaagctaaaatagttgtgggatttgctttataaatattttggaaccagcttatttgaatataaaatgtcttggttgcaagaaagagaaacattgttggattaagtcaggaatatcaggagggagatggttaaaaggctacccagaaaactcgcggaaacagccagacctggagaaagcagggacagaggagccatcagaaaccaaggctgatactgtctcctcattgtactattgcaatcagtttcctttgctcacttgtaaagcccaacagaagaactaaacccaaagtccacagggctcttgacctcatgcacccaccactgactagcctgttgtcaaggtctcttacttcttgagggacagagaagtgctctttggctcaactcagtcttcgacgctctattaaccatataggtcactgccatgagctattgcaaatgactagggtggtgtcctgtcatctatagagtgctccttcctgaagctacaggtaggatgagtagagctcagatccatatgttgtggaagccacaggctccagacatccttagttgggtaggatctcacagatctcatgaagttgtagagaatattaattttataagttaaaactagattgtgtccattttatctcttcaatagaaatacaacttaggctgggtggtggctcacgtctgtaattgcagcacttcagcaggctgaggcaggtggatcacctgaggtcaggagtttgagaccagcctgaccaacatggagaaatggtgtctctactaaaaatacaaaattagctgggcgtggtggctcatgcctgtaatcccagctactctggaggctgaggcaggagaatctcttgaagccgcgaggcggaggtagcagtgggctgagattgtaccattatattccagcctgggcaataagagcaaaactccatctcaaaaaaaaaaaaaaagaaaaaaaaagaaaagaaaagaaatacatcttatacactgttttttttttttttttttttttttttttttttttttttttgagacggagtctctctctgtcgcccaggctggagtgcagtggtgcgatctcagctcactgcaagctccgcctcccgggttcacgtccttctcctgcctcagactcccgagtagccgaccgccaccaagcccggctaatttttttgtagttttagtagagacggggtttcaccgtgttagccaggatggtctcgatctcctgacctcgtgatccgcccgcctcggcctcccaaagtgttgggattacaggcgtaagccaccgtgcccggcccttatacactttttaaaacaagtggcccatatttcttccacatgccatttatatgcataagctgattgaatgaaaaaataaaatctttttatccattgctgacctgaaataagtacacaccaggtgtcatgatctgtccaggtacagagtgaaggccaactctaccatcattagtcaaaaaaaaaattttccaagctctcaagtgaaaatataatgaaaatacaatgaaattctaattccaaagacttgtattcaaattttggcaattacaaatattggtataatggcaagacttgtatcttctccaagcctcagtttctatattaataaaaaagcaaacaatgtcaggtagaatagctctaagaattaaatgaatgaatacacaacaaatgctaatgttttggtaaactctaaagtacaatataaatgttattctattgcaaataagaacatacctccactaaccagtgtgtttttgttcaaaagtcaacaggaattgtactgtatttggctggataaagcttatcatgagatggatgtattccagacataggaatatgcctttactttctcttaacattttatttttgtgaatacatcagaatccacatagaaataatcagcactgtattatcgtagaatgttgaacaaccaagtgaagattctacaatatttgaagaaatgttttcagcagcttgaaaatgatgatgcttattaggattgcacagatttttgactctaagttttctgtgctcaatagcaaattttttttctatatatgttggagaatgtggagtgcctgggaaaagaaaaaaattatccacatctacatttggacattcggttttgaagatggaaaagttgtgagccaaggaatatgggcagctatattcacacgtctgatcaatgaaaaaaggaggccttacacaagccaaatcttatgatggaatggcaagagctttgaaaggaaattccccagtagggaggagcttgacaagttcagccagactcagccataggatgtggtgtcaaagcaccatatctgttccaaaataggcaaaataagggcccctcagaaatgtccatgtcttaatttctggaacttgtgaatatgtcatattacatggtaaggggaaattgagttgcagatggagttaaggttgctaatcagttgactttaagataagaatattatttgggattatcttcacaggcccaaggcaatcataatagtctttgcaagtagaagaagaatcagcgtcaaagtaaggcagggtgagaaaaacttgacctgctattaataattttgtagaaggaagggggtcatgagccaacgaatgtgggcagcatctgggagctggaaaaggcgaaaaaaaaaaaaaagaaaagaaaagattctctcccagagactccagagagaacacggccctgctgacactttttgttgaatgagacccattttgggcttctagcctccagagctataggactatgaattagtatggttttaagttactaggtttgtactaatttgtcacagcagcaataggaaactaaagcaaacaccagacctaagcttcctcctgcctcaggtgggataattcaggcatgatgtgcatggtttcagtgggttggagcctctgctgcccactgcagtacactcttcactgcgtaccctgtaccctctttccctttctcacttcatctttttcctggggtaaatacttaattccagataaatgacttgcctcacatttctaccttgggatatgcttctagtggaacccagactcatggaaggggaagatcatgagtgataaattccaggttgtggtctgcttaaaaggatgcaagagtttgtgttgcttcctcaaggcctttggtgtagttgagagttgtttctgcctgccttcattccgctttcttctgataaagcatctcgcctttgttcaaggcacccccttgtcaaacaaccgtgtgagcccctgtctccaggtgaagacacctacccagccggcctggggcatatgtattcttttggcttccatgaatgtttttggtctgggtaagtgcaatctgcttcaataactttctctttcgcttaggctgcctgtttgtgtggatctgggccagagctttcctgcagccatttgtagtcatcttgcagattctcaaggggagaggctacttgagaataaagctggcagggaggaaagcagagcaagagagcaagattgagaaggagaagacaggctatagggcatcttaggggccagggagtcagcacatctgatgcgagctctaccttgggactttccataagactctaaatttgttttcatttgcattgaaactagtttgagtttggtttccatctcttacacccccaaatatcctaactaatacagacttgatcatattgctggtcttcactggtcacctgtatctattggcaaaatgtgtttcagaaagtggcaggatggggcttacttattgaactaaacagcctgtgcactaaagaatggccctaggtgggtccaacctagcaagtggtgtgaggagcttgcttcctgtaatgaggaagtgaggggtggaaagcttgggagatggctcactaggtaaggtgacatttggggcttggcatctaggaccagtggtttaggctaagtttgagaccagcctgtctagtctcctctgaggatggctgtcttggtggagcaatgttaaaggagtagaaggcaggagtgagctctggtctgccacaggagaccacactttgcagagtgattaagagaaagtggcacattaccaaacctccaagttccacttctgcatccccaggagtctcactgggaatccaggccagccccaaggccaggctcaaagccttcattgtttccaacaatgacttaaatccatttcattgccaatttccagaacttgatctgaattttatttatcatccatccattaaactcctactgtgtgtcagcaaggagttattaaagatactctcaatttgcctgcagtctaggggtaacatatggcaatagggatagcttgaatcacacgatattaaggatggaacaggggaacagtaattcaagtgaccactgacttagcatcagaaataatggaggacataagaacctgtgaaacatctctaaaaaagaaaagaaaaattatcaaagtagattttttttaaatccagcaaatacatgcttcaggaattaaggtgaaataaagacatttttagattacagaaaaccaaaagaatcaaccaccagcagacctatactaaaaggccatcttcaggctgaagggaaatgataccagacagaggcttacattttcaggatgacaggaagagctctagaaataatacatttgtgggtatatataaaagttgttttctcttaatttattcaaaatatatattactaattaaggtattggttgtaaaagtacaatctgtgggtcaaatccagcccgttgcttattttagtaaatacagttttattggaaccacagccacattcattcctttaagtattgtccatggcaatacattctctctctctctctctctctctctctctctctctctttcttattacaagagcatatttgactagtgacaaactgtatgaccccaagagcctataatatttatgatctggccctttacacaaaaggcttgtcaacttttggtttaaagcagaaattataacgttgagggtttaacatatgcagatataatacatatgacaatacgaaactctatgttgcaaggttcttacattctaagcatagtacaatgctaactctaatagacagcgagaagttaaagatgcatattttaatctctagagcagccacaaaataataatgcaaaaaagtatggcgataaaggaaataaataaattaaaatgggatctcagtattaaagaaaggaactccaaagccattttcttcaaacattggccacatgtcaatcgtccctcttatgtcttcataaatgggatccagcttctgcctgaaccacctgtgaatgccctgacactcctgagataattagatataaaagaaagagtatgcttcgtaataaatataaaatgttttaatagaaaattgatacatttagagaactgatctcttggtgttcaagagaggttgtttctccttccttgacatttggcaaatctgataaagacatcgagtacctgcttgtgtgatttactgtcttcatgtttgttttgagttcagtccccagatgacccataaaaagttgtggctctcctgggagaatgaaataataacgtacagacttcttgaaggtttttacttatttttcaaacacgctttagttatttgttatcacctaatgcataaaatattttttaaaatccgtgttctaatttttataaagttggaagacttttcttcttcttttctgtaagaatattctagggcaaatgctgtttgcacttttttagtcaattgatatttttaaatatcttgtaaattcagaagcaaatgattgaaataatcttagattcctctttaatagctattcttactagattttcataaaataagtcagtagagcatgtgcaagactgctcaatgatagaaacttataaaaagttttaaatttcttacttaaagagctattataggaaccatagagttttaaaagtttttcctttgctcaggtgagatgacattcaagtgaaaaccctagtagacttatttcactggacatatttcttctttattcttaaggttcaatttctcctccattgaaaacatttttaaaataaaagctagtataacaaagtgtccaattactgtttggaggtcagctggctgtaaaaattcctcctgaagccacatcacatctatgggcaggttagagaagtacttttacctttcactgatgtctgactggggatgccctggccctcctagtgaccactcagcacaatgacattgtaagatacacagctcatgcctgactgctccatcagagcttaatcgttctcagaattcattctgtgattttattcacagaactttttgccttataaataaaatttccaacttcctgcctcactagaaattatatgctttctgaaaacactgtattgctttgtataattttccattctgtttcttgataatgggaaacactccacaagactgagatgactaatttagttaaattggtatagaatttgagattgagtattaggtagaagtactttagcagatgactgataccggtgttggaataagtaggttgggcttttcattataatttagtcatttgatagctgagagtctgagctttagacaaagctgaaataaacaccttaagaggaatatctctttacttttgaaccatggtctgcaacatcgctgaactcccctcagtgccatacatggtgcagacaggctcagcagaagaaactcagtgcctgcaatcctaggaaaacacagtctctctggaaaatgctgtgcatgggatatttgctttgctatcacatggaattcagtcatgagatttgaagacgttcaactgtgcttctctaaaatcaaaccagacatgctgcatggttgattttaaccggtgtgcaagcagctgtagtttccctttctttaaaataactttgaaaggtttctcaaaacttccaataatattttatgttaatgtgaactaaagtgcttcagactttgccatatatttctaagccttaataatataatatgactattagcaaataaactaggtactttttaggcattatctcacatttaatttttacaagcctataacagagatactaatattatccttgttttaaactgaggcatagactaattaaggaatttttccaatgtcacagtttgcaacaatggtgggatttaaaccagaagtctgattccaaagtctactgtcttacccattatgtagttagcttcagttatgaagctctccataaatttatggtcaaacaatattcacttgcagtagatggaaaattattatgcaaccactagagaagatcagatgagattctagtaaaaggaaacttctgtgcatcgtcaacttctcaatgtccatcatgatcataacagtatttttttttttttttgaaatggagtctttctctgtcacccaggctatagtgcagcggcgaaatctcggctcactgcaacatctgcttcctgggctcaagcgattttccaacctcagcctcccgaataactgggattacaggcatgcgccaccatgcccggctaatttagtatttttagtagacatggggttttgccatgttggtcaggctggtcttgaactcctgacctcaggtgatccgcctgccttagcctcccaaagtgctgggattacaggcgtgagtcaccatgcctggccgatcataacagtcttaattgcaatttgttaaataataatttaaactgaaatgatatttacctgtagagaccccaggatccacagttatatctgtttcccaacatcagagactttcttttatggggcttgcaggaattctaccaatatttactgagtacttctgatgaatcagacattggtctaagaactgtaagagactgaaagatcaataagaaaaatccctatcctttagacaattgggatctagcagggaggcaagagaagcttactcaagtaaccactgagttttaagcaaaatacaagtggaatagaagagaatgagatcagagtttccgtgacaatctgggaagactacagagagaaggtgagatttgaacaaggctttaaacaatgaaaccactaggactttgaaaggcagataatggccatgcagagttggtaaaataaggaaaatattggactgggagtaaaaatagagattttttaaactccaggcttatttcaaggtcttccaattaccgtctaactaccttggtcaaatcattcatttttttgtgccttagtttctgcagttgtaaaaaagagactgcattctggggctctagtaagaattaaataatacacagtattgagaacagttaataaagaggctatgaaatactgactattttaatttattatttagtagtagaagaaatagtgtttaaggaaagaaccagcaaaagcaaagacacacaacaggcacctctctaattaataaatgaaaatgtttatttatttgatacctattatttgctgctgggtgctttgcacatattgccccatttaatgctgacagtgatgaagcagcatttgaatgatttatttaatctctcgtttttctcatctataaacagcagttaatatctcaaatttttgtatggctataataatgattatatgagataatatgtggaaaggatatggtacatggcagacatttgagaaatgcttgcttttatcatttattgttcctccatctacctatttcctgatgaacatttcacctagtccctggctcatacccttgatcttgacattactaataattacataattgactgcccttctggtttcctgacttgagtcctgtgtagggaagaccttactttggtctaaatacccactccatcacatcctcatgtgaccttggtcatattattaacctctttgtctcagcttcctcatctgtgaatgagcatcagaatagatgcctgtcattgtggctgtcatgagaagtaagcagcataataagtggaatgtacttagttcagtgcttggtacaaattgattactctgtaaatggttaaatggttatccatgttagtcactgtcactttagtccaagatacccaggtttctcatcatcatgtgattctgtggtcaggtctaccttcatactgtctcccttcctacacacttgcccttccaaatcccttccaaatgcctttctctatcagaagtcaaagcaatcctttaagaaatggaagtcagagcatgcctttctccagattaaaactcaacaatatctccccatgtttttcacctattctacaaggctcttcttgacctagcctagtcttcccacctgactttatttccttcttctatggtaccagtcatcctggacttctttccattcctcaaacatgtcaagctctttcctacctcagggactttgtacttgcaatttcctctgcctggaatgttcttcccaacccagatcttggcatgactgactgtttttgttgttgttgttgttgtttttgttttgttttgttttgcttttttgagacaaagtcttgctctgtcacttaggctggagtgcaatggcgagatctccgctcggtgcaacctctgcctcctgggttcaagcaattctcctgcctcagcctccctagtagctgggattacaggtgcccaccaccactcctagctaattttttgtattttagtagagatggggtttcaccatgttggccttgaatgcctgatctcaagtgatcggccccccttggcctcccaaagtgctgggattacagacatgagccaccatgcctggcctgcatgactgactcttattgtttgtgactataaacattacttccccagaaacttgcttcctaacctacaacttaaaatagtgtttggtcactatttgaagagtagacaatcacactttaaatagataatctaatgctatgccctattgtattcccctcataacagttactagtgtcttgatattttatttctatttgtttattttttttgtttgtttcccatctgaggagaataaaagtctggtgaaagcagagaccatatttattttattcatcattctgagaattggatgggacaatcagagctcagtaaatatttgtaatgaatctgtaaaccaaggacaacggtaggatccctcttacaggactttatgagtgttaaccaagataatgcatgtaaacaccttcgtacagtgcctggaacacagtcaggtctcagtggatgccaaatcattaggttcaggtaataaaattgtatatggagctccattcttgccctcaagtgcctcaaaggccagagtgaagaaggagatggctcacaaatgaatatgtcatttactaccattactttcaatggcaaaaatcgcagttaccttggcaccaacctaatagtaagtggtctgatggaaatatataccaggggcccctggtgcagagaggagaaggtaattcaagcttccaagagtggatagaaagctgaatggaggacagggctctccaggtgaaggtattttcagacagaggggcttgcctatgaaaaggcacttaggagatggtgagcattttgaggtcttacgggaactgacggtgtatgtggggagtgatagggatgatgctggagaggcaggttgtggccagactctggaggcctaagtttttcaggagttttagccttgtatccagaatagattatgcacagcagcacgaagagaaacaatacgaagcaaatctacaaggcaagggttctcaggctttttctttaataaatatataatgaaatagctattacctgtatacaagctattaatgtttttagctaccctgaaaaactgttagcatagtttttaacgtgctcccttttttttttgagatggagtctcgctctgtcacccaggctggagtgcagtggcgtgatctcagctcactgcaacctctgcctcccgagttcaagcaattctcctgccttagcctcctgagtagctaggactacaggcacatgccaaacacccagctaattttttttttttttttgtattttagtagagacggggcttcaccgttttgtccaagctggtcgtgaactcctgagctcaggcaatccgccctcctgggcctcccaaagtgctgggattacaggcgtgagccacagcacccggcctattgtgccctttttacaggtgagaatgatgaggctcaatctcttgactccaaatctggtgcatttgctatactatagtgctttactggacaacttttgggggtggggttgaaaatcaaagactaaaaaagtgacccttgcaagggctgaggtggaagccattggcaataaacttgctgccccgtcagagaggcagctgttcattttcacatgccccaaagaaaaattccactgcctgcaatcaccacttccactgtgggctgctgcagcatgagcaaaagcatgagcaaacctcatgtcaccagctgcctgcctatggctgctcctaaagaaagcaaatctgccctcccagtagcagggccacagcacagccactgccccactcacctgagcattctacggcaactgggggatttccccaaccatgcctatcacagatagtgcctgcatgtaccactggggagcctgaaagcaggtctacctggcttgactctacttcccactcccagaccagagcacactgtacatgggcctggggctcacccagcccagtctaccatgggtggcacctgagcaattctcctggggtctgagatcaagcccatgcaaccagccactaccaccgcagctgaccacctaattgcttcacctgttggtcttggaaccagttcatccaacccatcacagccactgtctatatcagcacagactgcttgggtcccagaaggttatcccaccactgccactgccactggctatgtcacaccagctgcccaagggatcaagaacctgcccaactgcccaaccaactgctgatattcccagcacacaaacaagccacctggaggctgaataattggtgtgtctggactcagtaacaccagtgtcagcatatgccactctggtgcccaaggacagttcattgatgacaccattggtgcttgaggactggcctatgtggcatcccagttccccacaaaacttcaccacaacctccactaacaactgcaccctaagctgccaagaaattatagacactgctgatgctgtttccagctgaagaagccacacacaaactacactactgcacatgtccagaatcaaagccaagatgccgtacacaaccaacgttatagctacatctccaggaaaatgttttcctttacaaaagcaactggaaaaaattggaagaagtgaccattacaccaggtgcaaagatatcagtgtaaggatagaggatacatgaaaaagcaaggaaatataacacctccaaataaacacaataattgtccagcaatagaacctaatcaaaagaaatttataaaatcctcaaaaaaagaattaaaaaatattgatagtaaagaagctcaatgtgaacttctttttggattaattcaattcaatttttagaattcaattcaattccatttttagaattcaattcaattccatttttagaattcagcagaattctaaaacataagccaaacaaattacagaaacaattcagggtacaaataagaaatttaccaaagagatagatatcattaaaaataaaaaattaaaacgttgggactggagagcttagtgaatgaaatacaaaaacatttagaagcttcaacagcagtcttgatcaaacagaagaaagaatttcagaacttgaagatagctcctttgaaatagccctgccagagaaaaaataaagacaaaataataaaaaggatatgggggtaccataaggtaaccaaatattattataattttcagtctcctaaaagacaaagggaaaacaaaagggtgaaaataccaatttaacaaaataatagatgaaaacttctgaagtctaataagagaacatatcaaatccaaaattagtagaaggaaaaaaataacaaagatcagagcaggactacacaaaatagagatttgaaagagtacaaagcttcaataaaacaaaagggtagcttttcaaaaaagatgaacaaaatcaataaaccacttgctaggctaataaaaagagagagagaagatccaagtaaacaaaatgagaaattaaaaaggaaacattataactgatactacagaaatacaaaagattatcagagattattatgaacaagcatacattaacaaactagaactcctggaagaaatgaacatattcctgtacacatccaacataccaagattgaatcaggaaaatggaatagctaaacagaacaataatgagtaataagattaaatcagtaataaagcatcttccaacaaaaaaataattcaggaccaggtggcttcatggctgaattctactgtactttaaaagaacacctaactctaattctcctgaaactattccaaaaattgaagaggagggaattcttcctaattcattccgtgagggcagtattgccctgatattaaagccagacaatgatgcaacaaaaaagaaaacggatgaacatagatacaaaaattctcaacaaaatactagcaaactgaatccaagggcacataaaaaaatacaccacgctcaagtggaatttatcccatggacacaaagatgattaaacgtatgcaaatcaataaatgtgatacatcttatcaacataataaatacaaaaaccatgtgatcatctcaatagatgtggaaaattcaacatccctacattatgaaaactctcaagaaactaggcccagaatgaacacacctcatcatagtaaaggccacatgtgacagacacacagctaacatcatactaaaaagaggaaaagcttaaagccttccccttaagaattggagtaagacaaggatgcctgctttcacctctcctattcagcatagtactggaagtcttagccacagaaatctggcaaaagaaagtcattcagattaaaaaagaataaattaaattatccctctttgatgatgacataatcttacagctagaaaaacataaagactccaccaaaaaactcttggctccgataaataaattcagtatagttgcaggatacaacatacaaaaatccatacatttctatataccaataataaactagctaaggaaggaatcaagaaggcaacttcatttacagtagcaacaaagaaaacaaaatacctaggaataaattaaccaaggtggtgaaaatctctaaaagtaaaactataacacatggataaaagtaaccaaaaagcacatcaacaaatcaaaagtcaccgcatgctcatggatcagaagtattcatatcattaatgtttctatactggaaccataatgcccaaagcagtctgtagattggatacaatcactactaaataccaatgctattttttacaaaaatagaaaaaaattataaaatttgtataggatcaaaaagcccaaatagcctgagcaatcctgagcaaaatcagaaagctggaggcattacactacctgttttcaaaatgtattacaaggctataggaatccaaacagcatgatattgttataaaaacagacacaaggatcaaagtagagaatccggaaataaattaacatatttaaaatcaactgatttttgacaaaagtgccaagaacatatgttatgggacagacaccctcttcaataaatggagctgtaaaaattggatatctataagtagaagaatgaaactggatccccatcttttatgacacatgaaaatcaactcaagatgaattaaagactttaacacaagaccccaaactataaaactacaggaagaaaacataggataaaacactcaggacattcgtctaggcaaatattttatgtctaagaccttaaaagcacatacaacaaaaataaagatagacaaaagggactatattaaactaataagattcttcacagaaaaggaaacagtcaatagagtggagacaacctgttgaatggagaaaatatttacaacttattcatctgacaaaagactaatattgagaatatactagaaatttgaaaaactcaacagtaaaaaaaaacaacaacaaataattccattaaaaagtgggcaaaggacatgagtagatacttctcagaagaagacacacaaatggccaataagtacatgaaaaactacttaacattactaatcaactgggcaatacaaatcaaaagcacaatgagatatcatctcacccccattaaaatggctattactaaaaagacaaaacataaaagcttctagtgattttgtggagaaaagggaattcttatacactgttagagggaatgtaaattattgctgccactatggaaaactacggagattttgcaaagaactaaaaatagaactaccatatgatccagcaatcctactactgggtatttatccaaaagacagggaataattatgccaaaggaatacctgcactgctgtgtttattgtaacattattcacaatagtcaagatatgaaatcaacctaagtgtccatcaatgaacaatgggtaaagaaaacatagtatagatacacaatgaaatactattcagttatttaaaaaaaagaatgaaatcaagtcatttgcagcaacaggaatggaactagaggtcattatgttaagtgaaataagctggacatgaaaagacagataccatacattccactcatctgtgggagctaaaaatgttgatctcatggaggtagagagtagaatgatggataccagatgctggaaagggggtgtgagtgggaggtggtgatgaagaggggttggtcaataggtgaaaacatgcaattatctagaaggaataagttccaatgttcaatagcaaagcagggtgactatggttatcgacaatgtgttatatacttcaaagtagccagaagacagaacttgaaatgttctcaacacatagaaatgataaatactcaatgtgatgagcacccctaatagactgatttgatcattacacattctatgcatgcaacaaaatatcgcatgtaccgcatgtgataactgtgtaaaatattatgtatcaataaaaaagaaatgcatagaagtacataatttgagaaatagctgtactgtattatcaatggttgtttgcataatttgcatgatctcttcttttctcctaaggctgatgcttagcacaggtgaaaccacggacggaaacagcattttctttgtgagaatgatttaactctcagtgggaaaattcatactgtaaatttgctatgaattactttcttcacattggtgaattgtttgcttgtttttcctttggataaaaggatttttatgaaagtgagataaaatgacaattgccagaaaagtattggatgactttccattttcattatgaaataagataatctgacccacagtactccccactcccattctttgtcatgaccaggcgagataggtttgactgcaaatgctccttttttatttatttttaattttttatttttttgagacaaagtctcgctcttgtcccctaggctggagtgcaatggcacaatctcagcttggtgcaatctcggctcacagcaacctctgcctcccgggttcaagcgattctcctgtctcagccttctgagtagctgggattacaggcatgtgccaccatgcccgactaactttgtacttttagtagagatggggtttctccatgttggtcaggctggtctcgaactcccaacctcaggtgatccgcccacctcggcctcccaaagtgctgggattacaggcatgagccaccgtacccagccacgctcctttattattagcaaaaaatagtcctcataccatggtcacatgagagggaagtatttctttcagaattataaaattccttcaaagtattttctgttaattaattttaagatgcacacttggcaatcttggatagtccacttcccctctagggacctgtatgctcagctggaaaacaatctgagtggatgagatgattttaaagatgtcctcaatcaatgcaactctttgcttaacatccaagtgtttgtacagtacagacactatgtggtatgcaatgtaatctagaagaatacttctttgtgagagtaatgggccataaaatcattgctttgtgctaaataaatgatgccttgagtatcacctcaatacaaatatagatgaatttcattgaatgtgctgcagctttccgctatctctgagggtgcaaggaacgtgttttttatttttatatattccatagcttctaaaaatgcttggtacataagtgctcacatacccactgaatcaaaccctcgcattatgtggcacatactaggtgctttatggaactcgagatgtttcaaatgaatagaaataggggatagatggatggatgaatagaaatgacctccaccccagcttcaaagagaaataaagcttagagacactgtattccttgatgcagtagaatcctcttttttgcctcttttgaagtttgcatttcttgatgtgttttgcatattgacagtgatgtgccttggtttgttccctactgctacaggcatcagtgcaccaggctcactgcagctgcaatccctagtcaaacatttatgtttcctctctgaagtccctctttctgatgctttaattgctttttccctaggctggtgcaactatgagtcaccagattgcgcaggtgagctcacatcttcttcacacattctggctggcttttctttccaaaactatagttgcagcagtgtgagtaagaaagcctggatggggtgtttcctcactcatgatagtgttgtttcatcctaggaagctagaaacatgagagcagcattccagggtcagaccaactcagcaaagctgtgattctagctttcccatgccatttgtgagggggaggcaacaacattaattaataataagtaacaaaacaacaagggagaaaagtaacaagccaacctccgagatccttctgtgttgcaagacgagcaaagataaaagacttctaataccacaaactgacataaatttgacaaataagattaaagctaacctaaagcagctgagccttatgggtttacagggaattaaaagggcattagtatttatttgtcctttttcccaggatggtggatgtccccacattgaagtagcacattgtctgccaccaaactgatgagatggaaatgaatcaccaggtttttctgctaaatagaaatgtgtcatttcatactcaccatgctatgctttaggtatgatttggttgttctcaccaaaactcatgttgaagtttgatttctcattgtggcagtgttgaaaggtggaagctgatgggaggtgtttgggtcatgagggctctgtcctcattgatggattggtgccattctcacagtagtgacttctccctctggcaagactaggtaagttcctacaggaatagattagtttctgaaagagtgtgtcattataaaggcagcacgctcctcagcttttctctcttagcacgcgtccatttcccttttgaccttctctgccatattagaggcaacatggaaaccctcaccagaagtcagggctttgcccttgaactttccaccctgcagaaccatgagctaaataaacccattttctttataaatcactcagttctggtattctgttatagcaacccaatatggactaagacatattgctatggaagcagcagacataaatgtgtgatgagaattaccctacggctgggcacggtggctcttgcctgtaattgcagctctttgggaggccaaggcaggcggatcacctgaggtcgggagttcgagaccagcctgaccaatatggagaaaccccatctctattaaaaatgcaaaattagccaggcgtggtggcgcatgcctataatcccagctactcaggaggctgaggcaggagaatcgattgaacccggaaggtggaggttgcagtgagccgagatcgtgccattgcactccagcttgagcaacaagagtgaaactccacttcaaaaaaaaaaaaaaaaaaaaaagaaaaaaaaaaccctaaaagggagaaatgcaataaccaaataaaggccacttaagtgcttaagtgggacatcacctcatggtttcagtgtaaccaagtttacacatttactacaccagaacaaaaattttctgttctattcttgcttgtgcaaatcatgcaactttcttaatttctttaaatatacattttggagtttatttattggaaatgaagttgcttattcacaaaatctttccaaatatgtcagagtatcaacattaaatggataaaaatgtgtgcttctttgcagccagctattatagctctcaaatgtaatgacactgaactgtggtcaccactacattttcaaatgtgtatttaaacatagctatgaggctaagtggtctcttggctaaaaaattagtaggcattatttctaaaacatgtaatatttataatcaatctacatgtttggcttatatcaagatgctgacagggcagaaatattgttgcatttatgatgattttaaatttgtgactgatgtttctaaagtactggcctcatagctggtctaggagaagaactattgcccaaatctctctcttgtacctgcagaggtagctgatttttaaacaccaacatgtttttccacaccctgtgtcctcagtctcagtgggctggcctgactgatttggccattctgctaattcagttaaatgtcacagattcacttcccccattgactcatcagtagtgcacagagtgaaagtccttgccataagtaccttccacatccctgtccctgcctgaagaagtgtgtccttgctcacaacaatcagaaaagcctgagtgtatggattgttgtaaactcaacactgctcctgaaagaccagcccaatttgctatttttgctgctgggtgtcagggacatttgctgcagtcttaacaaacagcttctacagaatgcatttatcctttcctggatgggttgttaaaggcatttgtttattatctatctgtgtgaatatgaagatcagatataggaacccaagcatggctatgtcacttgccagcctgtatccatcaccctgctgtggccattctttggaatttctcccccttggaataagcagggattgctttactatgaatcttacaacacagactccattcatgttacccataagggctttctctgatgttcactgccaggcataaggaattagaaggagtgtcagaatgcttaaacaataaataatgaaaataaaaaaaatcccaattgttttctagcaatgaaaggaatcatgtaaaaccacactagttaccttaatcccagttagaaaacactagaggaattcgttatgaaacccaaagacatgatgaccttcacaattctccaggcaagttcttcatgtaccatgacaagtgggactgagagttttgggaaatgcagaagaaatgtgtcattttgaagagttctatgtggaagattgggattctagtggcttaaaatgatgtggagtgaaattgttttcaatgaaaatatttatcaaagttatatcatgagtatatctaaccctatgtttactgtatttgtgctatcatatgaatatattttgatttagtatttgatcagtctttactgattgttgagaatctactaactcagtgcttctcaaagtggtaaagggctagtttttcaaaatttcttatctctcctggattggtgcatagtcttaccacatatgactcatctccagcttgcaccacttgctaatcaccacgtaagtgtggcagcatctaaacaaatctgtcttcatttcaaggaagagaacgctgataatgcacatggatgttgcaacaatgtcaaattgctatgaaaatttctaaatgaattttctgctcaattgcctaccttgttgcaaattaataacaggcagttaacataactggtagtgttctgcagaccacattctgagtaacactacacaatttactgcctgcatccctagaggggatgggggaagaaataggctaaatcctaaaatgccatgatgccatattcaaatagtgttttatgaagaattgttcatttggcattcagcactgggcagtgattgaacttgagggaggcaaggagttttagaacctgtaatataccaggtaagaatttataaaaagctaacagaacaggttttcataaaagtgggactgagagttttagggacatgcagaaaaaatggggatattgttaattatcccttatccttatttattacacttgtcattcgttattataattaattattagtgatccttaattaatcttaaatattttatgattatttaaacatgaattttatgaatatttaaataattttgtaaatatcataaaatattttatgatatttatcaattcagttatttcagataaaagcactgaattagtagattctgaacaatcagttaagactgatcaaatactaaatcaaaaggggagcggtgaacaggggttcttctgtgcactgtgttttcagggtgttttgtaattagccagctgaatgaatgccaagactgatgtaaattagggcttataaacccagtggtttctaaggaatcacagacagttatgtggcaatagggtatggtggagactgtggtgaattagagaacaaatgcccattaaaaggagataacacttattctattccaggtaagccttctgattttccaaaaaacaaacaaaataaaataagacaaacaaacaaaaccaaacagaaattctagctttttatacaaaagctctgaattgctcaattgttatcatttaatttaaatcatttaaaaattctgtgccagccccaaagacagagaaacaaagagaacatgattaggccacttgtgtgtaatccctgaaaactctcttgaggtttctagagatgaaacagattctagcaagtttcatggaatgttggaatgtcaacttctttaaaggtaatgcaaaacataattttatattaacatgaatagggaaatgcataatgaagtaaatagtgaaatttgcaggtattcttaagagccattagattcaaatcaatgtcaatgttttagctgagtaggcagcttcagtctgggcaccaaaaatcttggaaaattattctcctttcctctcaggggtttcttagaggaacattctgtgaagcactatgttagtttttatgaaaatatctccaaagtgccaagcccatccagtgaaatgcagtttttttaagttaaaaacacctaaatggccttaaataggtggattatttaagatatttcatgttagaactaaagtgagagtacataatttcaaagaatccccaggggaaataaatagttgttgaatcacttcagttatttcagatataaaatagttaggcatatatattcacatttgttacattgttctgagagacaatggtacctggcttaccaagggaacttaattccaccacaaattggtacatgaactcttagcccagatgtgcttacatttctctcttgaacttaattaaaggcaggcatcacccatgcctctgtgactgccagtcagctaatttaaagatgacaaagctgtgacagacaagcactggactaaacggctgtggatcctgtaaatacacatgctgcatatccttcctaatgcaccacttgtgggcatgccaccagtccgtcctggccccctgagctcagtacaaagactttgttgcgtctgaaatagaaatgaaagtaaatattggaggggccaagagccatccggggaatgtgaactaagtgtccctgagtggtgaccacccctggtaggcagctggtggataacgtcagccaggagtaaaagaatgtggtggagtttggcttcttcagccagagaaggcctacaccagcgttaacccaaaaggctgcagatggagcaaaggatgtccacaaagatcagggtgggctcataatttgtcttagtttggaatcccccagaagcaaaccctgtgacaagaatttgagtgcaaatagtttatttgggttgtgaagaaagttccatcaggggggtcgggaagtgagccaggaagaaaagagagtccatcggaggtgcctagggaagctgcttacaacagtgagcagctggagatcaacccaactggggagctccgtgggcctcagggttaacccttctgtggggttttctcaattgatgcctgcaaagccttccttcattcaggcaaggaatgaatgcaggtcctggcagaggctggaagtcaggctaggaaccttggaaggaagggcaagggaacaagtgtagccaccaatggcatcagtcacatgaccttcctaaagctatcagtgcccctaaggcatatgcaaatctaagaaacaatggtcagtgtgtgcacttttgggaactgaagtatcttctctctgtattttttagttgccaacttttggatatgctaattgaaattaaactttcttccacctccccctccatttaaaaaaaatttggtgcctcttatttttgggtgccctaggtacattcttagcctgcctcttgtatagttaggtgatcactgtttgaaaagtaaagtggaagtaggcataaagatgacactgcaggtctcaattggagattcaaagtcagtcatttccccagttaggctctaacacaatgtaacatgatgaggggagggatttgctaatcacaaccagagtcaccactgagtgaaggcatgttctatgccaggctcccaaattaactaccctcattaatttcccaatcttgcttttggggagccacaccccacctcccttgatcacactagactgtagcaaagacagatgataacaataatggttaatatttactgagagcacaccaatgccaggcactgctctaagccttttgtgtgttttaactcattttattccctacagtgaccttctgaggaagtacctattatgatctttatttttcagaaaaggaagcctgggcttagagggaaggtgcttactcatgttacacaaagctaacacatgttggagtctagatttgaactcatgtcttctgtctttagagatgaccccccattccatcctgacctcagcactgcaccattatactgcaagcaattcacgattcagctgaatcactagatgatgaggagagaaattgcaaatatgattttgttggctatgaggcacaaaggtctcctggcaacaggaactcatttatgtcaccgcaatctccccatttaataacagagagaacatcattttgcagacatatcctcagcaggcaatttgcccagaaaatagggagcagatttctggatctaggggaaggaatgggaaagaatcactctgctgtggaaggtgagagtcttagggagcagacccagagcagtgagaggcagagcaccttccaacactcggaaatttccttgaactagtgtctaaggatggaaggccaagaagggcaggtgagggccttgatcattatttatttatttttttatttcacacaaagagttgctcagaaataggaagtctggatgccgcagagtttagaggaacttgggcagcatttaagtgagagggttgtaggagccctgatgggaagggatcctgggcctgtctatgaactggtctccttcaagtctctcctgcacagtgaagacatctgcacatttttgccatcaaattctagagactgagtacagtggtgtgatcaggctagagtgcagtggtgttatcacagctcacttgcagcctcaaactcctggcttcaagcgggcctctcccctcagcctctggagtaactgggactacaggcatgcacccctatgcctggctaatttttaatttttgttatagagacagagtctttctatgttgcccaggctggtcttgaactcctggcctaaagtcattcttctgaattggcctcccaaagttgtaggagtacaggggtgaaccatggcacctggcctaaagactggttttaaaaaaaggacatatggagccaagatggccgaataggaacaggtccagtctacagctcccagcatgagcgatgcagaagacgggtgatttctgcatttccatctgaggtaccgggttcatctcactagggagtgcaagacagcgggcacaggacagtgggtgcagtgcactgtgcgtgagccaaagcagggtgaggcattgtgtcactcaggaagtgcaaggggtcagggagttccctttcctagtcaaagaaaggggtgacagacggcacctggaaaatcgggtcactcctaccccaatactgagctttactgatgggcttaaaaaacggcacaccatgagattatatcccgcacctggctcggagggtccttcgcccatggagtttcgctgattgctagcacagcagtctgagatcaaactgcaaggaggcagcaaggctggggaaggggcgcccgccatcgcccaggcttgcttaggtaaacaaagcagccaggaagcttgaactgggtggagcccaccagagctcaaggaggcctgcctgcctctgtaggctccacctctgggggcagggcacagacaaacaaaaagacagcagtaacctctgcagacttaaatgtccctgtctgacagctttgaagagagcagtggttctcccagcacgcagctggagatctgagaaggggcagactgcctcctcaagtgggtccctgacccctgacccccaagcagcctaactgggaggcaccccccagtaggggcggactgacacctcacatggccggttactcctctgagacaaaaattccagaggaatgatcagacagcagcattcgcggatcacaaaaatgcgctggtctgcagccactgctgctggtacccaggcaaacagggtctggagtggacctctagcaaactccaacagacctgcagctgagggtcctatctgttagaaggcaaactaacgaacagaaaggacatccacaccaaaaacccatctatacatcaccatcatcaaagacctaaagtagataaaaccacaaagatggggaaaaaacagagcagaaaaactgtaaactctaaaaagcagagtgcctctcctcctccaaaggaacgtagtttctcaccagcaaaagaacaaagctggatggagaatgactttgatgagttgagagaagaaggcttcagacgatcaaactactctgagctacaggaggaaattcaaaccaaaggcaaagaagttaaaaactttgaaaaaaatttaggtgaatgcataactagaataaccaatgcagagaagggcttaaagaagctgatggagctgaaagccaaggcttgagaactacatgaagaatgcagaagcctcaggagccaatgcgatcaactggaagaaagggtatcagtgatggaagatgaaatgaatgaaatgaaacaagaagggaagtttagagaaaaaagaataaaaggaaacgaacaaagcctccaagaaatatgggactatgtgaaaagaccaaatctacgtctgattggtgtacctgaaagtgacagggagaatggaaccaagttggaaaacactctgcaggatattttccaggagagcttccccaatctagcaaggcaggccaacattcagattccagaaatacacagaatgccacaaagatactcctcgagaagagcaactccaagacacataattgtcagattcaccaaagttgaaatgaaggaaaacatgttaagggcagccagagagaaaggtcagattacccacaaagggaagcccatcagactaacagcggatccctcggcagaaactctacaagccagaagagagtgggggcgaatattcaacattcttaaagaaaagaattttcaacccagaatttcatatccagccaaactaagcttcataagtgaaggacaaatcaaatactttacagataagcaaatgctgagagattttatcaccaccaggcctgccctaaaagagcccctgaaggaagcactaaacatggaaaggaacaactggtaaaagccactgcaaaattatgccaaattgtaaagaccatcgagggtaggaagaaactgcatcaactaacgagcaaaataaccagctaacatcataatgacaggatcaatttcacacacaacaatattaactttaaatgtaaatggactaaatgctccaattaaaagacacagactggcaaattggataaagagtcaagacccatcagtgtgctgtattcaggaaacccatctcacgtgcagagacacacataggctcaaactaaaaggatggaggaagatctaccaagcaaatggaaaacaaaaaaaggcaggggttgcaatcctagtctctgataaaacagactttaaaccaacaaagatcaaaagagacaaagaaggccattacataatggtaaagggatcaattcaacaagaagagctaactatcctaaatatatgtgcacccaatacaggagcacccagattcatagagcaagtcctgagagacctacaaagagacttagactcccacacaataataatgggagactttaacatcccactgtcaacattagacagataaacaagaacaacaagacagaaagttaacaaggatacccaggaataaaactcagcactgcaccaagcggacctaacagacatctacagaactctccaccccaaatcaacagaatatacatttttttcagcaccacaccacacctattccaaaattgaccacatactgggaagtaaagctctcctcagcaaatgtaaaagaacagaaattataacaaactgtctctcagaccacagtgcaatcaaactagacctcaggattaagaaactcactcaaaaccgctcaactacatggaaactgaacaacctgctcctgaatgactactgggtacataacgaaatgaaggcagaaataaagatgttctttgaaaccaacgagaacaaagacacaacataccagaatctctgggacacattcaaagcagtgtgtagagggaaatttatagcactaaatgcccacaagagaaagcaggaaagatccaaaattgataccctaacatcacaattaaaagaactagaaaagcaagagcaaacacattcaaaagctagcagaaggcaagaaataactaagatcagagcacaactgaagaaaatggagacacagaaaacccttcaaaaaattaatgaatccaggagctggttttttgaaacgatcaacaaaattgatagaccgctagcaagactaataaagaagaaaagagagaagaatcaaatagatgcaataaaaaatgataaaggggatatcaccaccgatcccacagaaatacaaactaccatcagagaatactacaaacacctctatgcaaataaactagaaaatctacaagaaatggataaattcctcgacacatacactcttccaagactaaaccaggaagaagttgaatctctgaatagaccaaaaacaggctctgaaattgtggcaataatcaatagcttaccaaccaaaaagagtccaggactagatggattcacagccgaattctaccagatgtacaaggaggaactggtactattccttctgaaactattccaatcaacagaaaaagagggaatcctccctaactcattttatgaggccagcatcatcctgacaccaaagcctggcagagacacaacaaaaaaagagaattttagaccaatatccttgatgaacattgatacaaaaatcctcaataaaatactggcaaaccgaatccagcagcacatcaaaaaccttatccaccatgatcaagtgggcttcacccccgggatgcaagtctggttcaatatatgcaaatcaataaatgtaatccagcatataaacagaaccaaagacaaaaaccacatgattatctcaatagatgcagaaaaggcctttgacaaaattcaacaacgcttcatgctaaaaactctcaataaattaggtattgatgggacttatctcaaaataataagagctatctatgaaaaacccacagccaatatcatactgaatgggcaaaaactggaagcattccctttgaaaactggcacaagacagggatgccctctctcaccactcctattcgacatagtgttggaagttctggccagggcaattaggcaggagaaggaaataaaggatattcaattaggaaaagaggaagtcaaattgttcctgtttgcagatgacatgattgtgtatctagaaaaccccattgtctcagcccaaaatctccttaagctgataagcaacttcagcaaagtctcaggatacaaaatcaacgtacaaaaatcacaagcattcttctacagcaataatagacaaacagagagccaaatcatgagtgaactcccattcacaattgcttcaaagagaataaaatacctaggaatccaacttacaagggatgcaaaggacctcttcaaggagaactacaaaccactgctcaataaaataaaagaggatacaaagaaatggaagaacattccatgctcatgggtaggaagaatcagtatcatgaaaatggccatactgcccaagataatttatagattcaatgccatccccatcaagctaccaatgcctttcttcacagaattggaaaaaactactttaaagttcatatggaaccaaagatgagcctacatcctcaagtcaaccctaagccaaaagaacaaagctggaggcatcatgctacctgacttcaaactatactacaagcctacagtaaccaaaacagcatggtgctggtaccaaaacagagatatagatcaatggaacagaactgagccctcagaaataactctgcatatctacaactatctgatctttgacaaacctgagaaaagcaagcaatggggaaaggattccctatttaataaatggtgctgggaaaactggctagccatatgtagaaagctgaaactggatccgttccttacaccttatacaaaaattaattcaagatggattaaagacttaaacgttagacctaaaaccataaaaaccctagaagaaaacctaggcattaccattcaggacataggcatgggcaaggacttcatgtctaaaacaccaaaagcagtggcaacaaaagccaaaattgacaaatgggatctaattaaacttaagagcttctgcaaagcaaaagaaactaccatcagagtgaacaggcaacctacaaaatgggagaaaattttcgcaacccactcatctgaccatggctaatatccagaatctacaatgaactcaaacaaatttacaagaaaaaaacaaacaaccctactaaaaagtgggcgaaggacatgatcagacacttctcaaaagaagacatttatgcagccaaaaaacacatgaaaaaatgctcaccatcactggccatcagagaaatgcaaatcaaaaccacaatgagataccatctcacaccagttagaatggtgatcattaaaaagtcgggaaacaacagatgctggagaggatgttgagaaataggaacacttttacactgttggtgggactgtaaactagttcaacccttgtggaagtgagtgtggtgatttctcagggatctagaactagaaataccatttgacccagccatcccattaacgggtatatacccaaaggactataaatcatgctgctgtaacgacacatgcacatgtatgtttattgtggctctattcacaatagcaaagacttggaaccaatccaaatgtccaacaattatagactggattaagaaaatgtggcacatatacaccatggaatactatgcagccataaaaaatgatgagttcatgtcctttgtggggacatggatgaaattggaaatcatcattctcagtaaactatcgcaagaacaaaaaaccaaacactgcatagtctcactcataggtgggaattgcacaatgagaatacatggacacaggaaggggaacatcacactctggggtctgttgtggggtggagggaggggggagggatagcattaggagatataactaatgctaaatgaggagttaatgggtgcagcacaccagcatggcagatgtatatatatgtaactaacctgcacattgtgcacatgtaccctaaaacttaaagtataataataataataaaataaaaaaaagaaaagaaagaaaatgtggcacatatacaccatggaatactatgcagccataaaaaatgatgggttcatgtcctttgtagggacatggatgaaattggaaatcatcattctcagtaaactatggcaaggacaaaaagccaaacaccgcatagtctcactcataggtgggaattgaacaatgagaacacatggacacaggaaggggaacatcacactctggggactgttgtggggtggggggaggagagagggttagcattacgaggtatacctaatgctaaatgacgagttaatgggtgcagcacaccagcatggaacatgtatacatatgtaactaacctgcacattgtgcacatgtaccgtaaaacttaaagtataatacaataaaattaaaaaaaaaaagaaaaggacatatgatggacatggggtcattatgctcaaaggttcacattgcaggtgagagctttcttttctaggcagaaattttctaccatagtcaggtttaccctctaacccttgaagtatgcccttcccaaacctccctcctagactcctaagcactgtcattgccaatcctgtttgtttgctttttttttttttttcatttccaccactggcctctcttcttcagtctccagcttcatttctgagtgacattctgagaagtagacttgggggaatcctttccatgcctttctctttaactgatctcaggcaaaatgtttgtcctggatgtacaatacttaaaagagttgatttaaaatttcctgaaaataagttcatctcagcttttgtgtgagaaaggaagttctatgttggctggtgaccatttcaaagctaccctcagtctcacaattagtgtgcttggcaatgctattggacattggaatgcaaatgttcacatcccaccttgagcttgcaggattttgatgcatttcctttttgttggacaaaatagtgagtattccctaagattacttccagttgcaacctgaacaaagagaaatgcatctaaatatcctgctccaaagcctttgaacttcaccaatgcataactcatgggacacttatcagtttgtataaatgctcacagtatggtgtttctttggatgggagtgttttcagactaagataacttatcacctcaagtcaatactatacagaggttgtacttgagaaatttgttttaaattcattatcattaacatgcaaggcagctgcaggaaattatacaacttgcaaagcatttcaaaacatgttcacatactgatatctgggctgtttgatccagaaacaaagggaaatcatgatctttctggctacagccttaccaacaaagagttttgcttttcttaataatcatctttagtccaagttattttttattccagtgacactgatgctcgccagtgattttagattgataataagaaccatgttcgtgggttggaagtacaccgccaggatcagtatagatttcataactgcatcccttcacgtttgaaatgagctgtgagaatacaagtgtcctgaaaaccaggatggaataactaagaaaaaagaaatcttctcatctatagaatggggtgaaacataaatgcgtgaaatgcattgggacttcgttattccaaacaacaaaagttacatgatctttgatgtaaaagaatgaccagaaactctcgtacagctcagcatatttggcaattaagtcaaaggacctttctggaggaatgtgtgttttgtaaagttcagaactcagtccaatttcatgggttttgaagttttttaaccaatcttaaactgtgcacggtgccagttttgaatctatgtgtttcaaaaattcttgacgaaaggacagttggtttctgggaaaagaaacagcagaagatcagataagcaagactgggccaccgggacactgggcttctggagggcctgtttttctctcatttttccttctctgctttctctccacgctccccaaatgtgcaccagatgtataattccagtgtgcaagatttgttctgatttggggtttttgcccatcttatctctactttctaatcaaaaggcacctaaagtaataggaatcaggttaactgccccatcttaacgtgctactcaagggacactcaggagctctgaaaagccatgccttggagcacctgaaatgccctgcactaatcactcctttgtgttaaggactctgtaaaatgaataatatcccaactgaacatggtaaaggagggttatctgggttggtaaatgcagagaggagacctttcctacccattaaggtgtaaactccacatccagaagctctgagggtctgagggaattggacaaagataagcacattgtggcagcagagggaggagaggggatatggaacatggaagagcccgggaaggctgtggcatgaggatgtcaccagtgggaacctgggcaggtggggacagcacaaggacatcaaaaacttggaattcggaaattaatcaggggctggacaggtgggctgtttcttttctttttttttttcagacagagtctcgctgtgtcgcccaggctggagtgcagtggcacgatcttggctcactgcaagctccgactcccgggttcacgccattcttgtgcctcagcctcccgagtagctgggactacaggcgactgccaccatgcccagctaattttttgtatttttagtagagatagggtttcaccgtgttaggcaggatggtctcgatctcctaaccttgtgatccgcaggtgggctgtttctaagactgatgtggcttaacaaggaattttcccagaccatctctactctccacaattttcaaacaggattattactttgtctttcacctcagtgcccatgtgtttgtggatccctctagatacttgctttgctatttcttacatctctaatgtgaagaattaatgtcccagttataagaactttatgtcctgtacgtagatgttctctagtcacacccctgacatgtgtgaggcctgggaagaggcccacatcccatgggcacaatatttaaaagttgtaaatcaagtgggaaagttgttaaataaaacagattctattcttctacattgtcagatattccaccttcatcatgataaaatagaaaaatatgtgcaaacaggtttttgtgtgacggaaaatcagcaaaatatcaaatatgactgaatttaattattattgtgcacataccagtgatgtttagaatatcaaaatgcatttattgatatgttttgatatttgatatcatatgcttctttgaatttttttttttttttttttttttttttttgtgacagagtctcgctctgttgcctgggctggagtgcagtggtatgatcttggctcactgcaacctccacctccctggttcaagcaattctcctgcctcagcctcctgagtagctgggatttcaggtgcctgccaccacaccgggctaatttttgtatttttagtagagacatggtttcaccatgttagccaggctggtctcgaactcctgacctcaagtgatccacccactttggcctcccaaagtgctgggattacaggcatgagccactgtactcggcctgatatcatatgttttgatatttgatctttagaatatcaaaacatatgaataataacacctgcacaattcataaattatttttcctaaaattttcttgccttcatttcagcaatatcacaaattctattttttaagagtccagatttttatatcatttgttttttatagaaaatgatgctaacttggtaaacttgctccagtcactgttcttcaacaggatcctaaaattaatttcgattttgagagattttcctctgctaaggccaagcgaatgaattttcaacacaattctttaagtgaaatttagaagagaaatgaagggtgaaatttgcatgtcatgttcaaatgttgtaattctgtcacacctgatatgctattatcatagaaattataaaaatattttaactgtattatatagattgttatgacgcatacaaattatcacttcttttacaataatatcaggatccatgcagggaagatatatagttcctggattcttctttcaaatttttctgtgctaggatattatcaagaaaacacaaaatatcatgtcttgtttaatttatttaaatctctcttcacacagcactatagtatccataaaatactctctgcatttattttggaattatttgtatttgaattttcccctttgtaatagaaatgatttgtgttgttctaatttctttttttttcctggaagatttctttgttacatagttcacatgcacttttgattttaaaaaacccccacattttatctaaagttaaaaaattaatcctttatagagtaaaatggccaaactcggatctgtttctgaaagctattgttaacattaatagcaaccgtgattcctacaaaataatgtaaatagtgcaaattcaaaattaatttgattttcttccaaagagtatgattcactatttatttgagcatcttacatttcacttaacttttctgatacattttgtatcttgtctaaattaaatctggtttctttatcagcattcagccagcattccctgtgtgacctagagaagtcgtaaagtcaaaattgatagtgtttcatcaagatgttccattttggggcaagcccagaaaatgtcatatacaattttgaatcattccgaagactgtcattgctattggcccagctgaggccatgtctcatagtaacaaattcaaaacatgtgccatgcggggctcaaggaatgcttctggttttcagccaaatttatggcctcacatctttttctttaccaaccatgtcaacagcattagcatagatttgccctgtacgatcttgtaaactctttaaataaagctgacatttaaaatttaattttataaaaatgtagtcagttcctttgaagatatttttataaacagtaagtagtcacaattctagcatgtaatacaaggcccatctaatagcattcttttggatgtacaactttaagggtcatgtgatttttaaaaaaaattgttattattgtactttaagttttagggtacatttgtacaatgtgcaggtttgttacatatgtatacatgtgccatgttggtgtgctgcacccattaattcgtcatttagcattaggtatatctcctaatgatatccctcccctctccccacaccccacaacagtccccagtgtgtgatgttccccttcctgtgtccatgtattctcattgttcaattcccacctatgagtgagaacatgcggtgtttggttttttgtccttgcgatagtttgctgagaatgatggtttccagtttcatccatgtccctacaaaggacatgaactcatcattttttatgtctgcatagtattccatggtgtatatgtgccacattttcttaatccagtctatcattgttggacatttgggttggttccaagtctttgctattgggaatagtgccgcaataaacatacgtgtgcatgtgtctttatagcagcatgatttatcgtcctttgggtatatacccagtaatgggatggctgggtcaaatggtatttctagttctagatccctgaggatttgccacactcacttgcacaatggttgaactagtttacagtcccaccaacagtgtaaaagtgttcctatttctccacatcctctccagcacctgttgtttcctgacttttgaatgattgccattctaactggtgtgagatggtatctcattgtgcttttgatttgcatttctctgatggccagtgatgatgagcattttttcatgtgttttttggctgcataaatgtcttcttttgagaagtgtctgttcacgtcctttgcccactttttggtagggttgtttgtccttttcttgtaaatttgtttgagttcgttgtagattcttgatattagccctttgtcagatgagtagggtcatgtgatttttttttaatgcttacaaaatgttcctcagctgccacacaactgttgtgaagacttaactgttgtgaagagttaattcatgcacatctctgcaagcagtgcttggaccacaaagaaagcaaggaaatggacactcacactgtctcattctatccgaggaagggttccacagattaattgattgatgttttttctctagtcaagtgcttctgctactctaattctcttcacttctgagcagtgtatgtttctgactttggcagtcataagatccaaaagacttcatggcattttgggtcagcctccttttgtttcaagtacttagggcaagagacgctagatctctgattgtactatctgggtccaatctgattgccagaattgttctgcctgggtcagctggctagactgatggcccatgagtttccctgctgatttacaaatttagtccaaaatgtaactttctcagaaagaggtcctcagtttattcctatagaccatgtgttgaaatcttgtgataatgtgtgtgtgtatgtttacttttccttgttgtatttacagggaattgtgcttgatacatactaggtacttcataaatacttgttgaatggataataataattttagtaagaatgtctacttccagatatttttttgtaggagtgtttggcagccgacatcagaatgtattggctgaacggcatagaaaaaatgttttgataaaacaagtgataatggaagataaatatattttatttatagaatgatgatttaatggtaaattatagacctgtatcccctaagcagtgtcttctatttgattgcaaatagcataggtgaaaatgcctgccactgtaattactgttgattatgatgtgcacagccatggattcatatttaagttctctcaactttcctctttcatactgcaacattagactatgtccatgaattttagctgccattcatggatgtaatgatgaagggcagtgagagactgttataagcccgagagaaatgaaacacaatgactaggaggggggaaaagagaatgagcagaatcctataatagatgctggagcaagactgttgacttggctaagataaggatgtcctatggtgtctgggttggatgctacagaactcctagaaaacaaaatgttaagaaaaaaagcatttggatgagagtgacctttgtcactgctcatgaaagctgtgtatatcagacagtcttgcttaagaccttgccaaaaggatgtgctaaaagaaacttgtgtttctgtttcaaaggtgcttgagtagcagcagcaatagcaaaaacagcagcaacaacaaaaattaatagagcttggatagaactttgccaagggtgttgacttttttctttttatgtctgctgtcaatttttttaaattttttattttcacaatttttggggaacaggtggcgtttggttacatgagtaagctctttagcagtgatttgtgagattttggtgcacccagcacccgagaagtatacactgaacacaatttgtagtcttttatcactcagcaccccctaccctttcccaaaagtctatcgtataattcttatgcctttgcatcctcatagcttagctcccacttatgagtgagaacatatgatgtttggttttccattcctgagttacttcacttatatgaaaccatccctgcatccctagtatgaaacccacttgattatggtggattatctttttgataggctattggattttgttagctagtattttgtgaaggatatttgcatctatgttcatcagggatattggtttgaagttttctttttttgttatgtcctttcctggttttggtattagggtgacactgacttcatagaatgatttagggaggattccctctttctctatcttgtggaatagtgtcaataggattggttccaattcttctttgaatgcctgatagaattcagctgtgaagcagtctggttctggacatttttgttggtaatttttttattactatttcagtctcgctgctagttatttgtgggttcagggcttctaattctttctgatttaagctaggagggttctgtattcttaagaatttatctatctcttctaggttttctagtttatgcatgtaaagttgttcatagcgatcttgaatgatcttttatatttctatggtatcagttttaatatttcccatttcatttctgtttgaccttatttggatcttctctattcttttcttggttaatctcactaatggtctatcaattttatttaccttttcaaagaaccagctttttgtttcatttatcttttgtatttttttgtttcaattttagttctgatctgatcctggttatttattttcttctgctgggtttgatttgtccttgtttctctagtcccttgaggtgtgaccttagattgtctatttgtgctctttcagactttttgatgtaggtgtttaaggctatgaactatacctttagcaccacctttgctgtatcccagaggttttgacaggttgtgtcattattattgttcagttcaaagaattttaaaatgtccatcctgatttcattgttgacccagtgatcactcaggagcaggttatttaattaccatgtatttgtatggttttgagggttcctttggaagttaattttcaattttattccactgtggtctgagagagtatttgatataatttcaatattcttaaatttattgagacttgttttgtggcctatcatatggtctatcttggagaaagttccatatactgatgaatagaatgtatattctacagttgttgggtaggatgttctgtatatatctgtgaagaccatttgctctagggtatagtttaaatccattgtttcttggttgactttttgtcttgatgacctgtctagtgctgtcagtggagtatggaagtcccccactgttgttgcatttctgtctatctcatttcttaggcctattagtaattgttttataaatttgcaagttccagtgttaggtgcatataagtttaggattgtgatattttcctgttggacaaggctttttatgaatatataatgttcctctttgtcttttttaactgctgttgctttaaagtttgttttgtctgatgtactcctgcttacttttggtgtccatttgcatgaatgtcttttttcaaccctttaccttaagtttatgtgagtccttatgtgttaggtgagtctcttgaaggcagtagatacttggttggtaaattcttattcattctgccattctgtatcttttaggtgaagcatttaggccatttgcattcaatgttagtattgagatgtgaggtactattccattcattgagctatttgttgcccaaataccttgggttatttatttattgtatttttgttttataggtcttgtgtgatttacgctttaaagaggttctgttttgatgtgtttccaggatttgtttcaagatttagagctccttttagcagttcttgtagtgctggtttggtagtggtgaattctctctgcatttgtttgtctgaaaaagactgtgtctttcctttatttataaagcttagtttcgctggatatgaaattcttggctaataattgtcttgtttaaggaggctgaagatagggccccaatccttttcagcttgtagggtttctgctgagaaatctgctattagcttgatatattttcttttataggttacctggtgcttttgtctcacagctctaaagattcttttctttgccttgactttagataacttgatgactatatgcctaggcaatgattattttgtgatgaatttccaagttgtttattgagcttcttatatttggatgtctagacatctagcaagaacagggaagatttccttgcttatttccccaaatatgttttccaaacttttggatttctcttctttctcaggaatgccaattattattgtttggttatttaacataaccccaaacttcttggagcatttgttcatttttttaaaattattttttgtttgtctttgttggattgggttattttgaaaaccttgtctttgagctctgaagttctttctgctgcttgttcatttctattgttgagactttccagtacattttacatttctataaatgtgttctttatttccttaagttgtgattgttttttatttatgctatctatttcactgaagatttttcccctcatatcttaaaaaaatttcttaagttgaacttcgcctgtctctggtgcctgcctgatttgcttaataattgattttttgaattcttcttctggcaattcaggaatttcttcttggtttggatccattgttggtgagatagtgtgattttttggggatgttaaagaactttgttttgtcaaattaccataattgtttcctggttccttcttgtttgggtagactatgtgggcgggaagatctggggctcaaggctgctgttcagattcttttgttccacggaatgctgccttgatgtagcacgagccccttttactagagatgtggcttcctgagaactgactacagtgattgttttttctcttctggatctagccaccccacatggctaccaggctttggactggtactgggggtgtctgcacagagtcctgtgatgtggaccgtcttcaggtctcagccatgaattccagcacctgctccagtggaggaggcaggggagtgaaatggactctgtaagggtcctaagttgtagttgtttaatgcactagctttgtgctggttggtctcctgccaggagatgacactttcaagagagcatcagctgtggcagtatagggaagatcaggcagtgggcagggccctagaattctcaagagaatatgacctttgtcttcagctaccagaggcgggtaggaaaggaccatcaggttggtgtagggttaggtgagtctgagctgagactctccatgggtggggcttgctgtggctgctgtggggaatggagttgtggttcctaggtcaatggagttatgttaccaggaggatatggctgcctcttctctgtcatgcaggttgtcagggaagtgggggaaagctagcagttacagacctcacccagctcccatgcaaccaaaaaggccagtctcactcccactgtgcgcctgccaacagcaccaagtttatttccaggcagtgggtaagcagtgctgagaacttgccccgggctaccagcctcccagctgagagagcaggcaaggcttttgcgcttccctgcctgttgagtctgcccacaagattcacgccatccactgagttctggtcaggaagcttcatgtttggttggaattattaccaagtttgtctagaggtttccttctccctgtggtcttttccaagttcccctggtagccctccccaaggacgcctatgagacaagtcagaaatggcttccctggggacccagaaatcccacggggcttttcctgctgcttcctctaccctgtattttgctcagctctctaaattgtctcagctccaggtaaggtcaaatccttcgcctgtgatctggcctttcaggtttcccagtgagggtgtgtgtttgggggtggacaatctccctttcccactttcacagtttgggaactcacagtatttgggctgtctctcaggtcctgcagaagtaatctgctttcttcaaagggtttgtggattttcttggctttcctggtatattcctgcagtagttcttggagcaaaacttcatgatgtgagtctccacactctgctctgcaatttagggagctgcaatttagtcctgcctcctatccaccatattttcctctgctgtccaagaatgtgaattttaccactttcaatgccccatcaattttgtctgactagtgtttgactgatagctgcataaatttcatcctgtctccacgacaccaacagaaaaatggtggtgaaaactgcagagtagacaaaaacaaaaacaaaacaaaaaactattataaagccattaaatcatctttaaagcttgcagtagttttactcctgtagatttttctaataccaaaaagactacatgcttatttctttgttgggttgttgctttgacacttctggtagcttattaggtggggatggaagatagtcaaaggtcaagaccacagtgttgacactcatgaaggctggtgagcaatgctctgtggctgggtcagtcaaatagtgcagcaaacagagaaaaccaggttaaccctggggccatgataccagaggtccatcagtgaaatttttaaatagaatttttaaaggaaaagtgcacaaatcactagtttacagctcaatgcattttcacaagtcgaatagtcgaatactcttgcataacccgcacctaaattaagagacagaatctcatcagcccccagaagcaccatcacctctgccgtcttccagacagagccctccaaatagtaaccactatcttgacttctaatatgtggattagctttgctatttatacagtatatatccttcgtataaggctcttgttacgcaacaggttgtgaatttcatccactttgttgtaggtagttggagttcattcatgctcatagccgtatagtattcaattttattactatagcacaatatctttatttattttactattgatcaacttttgggtattttctagtttgcagtcatttcaaataatcctgaaataagtcctcttatgttttttttttttgttggaacatacatattttgttctgctgagatatagggtacgtgtatgttttgctttaactaatactgacaaatagtttagtttttcaaaatgttttggatccatttttactcccacatttggcaaataatttattcatgaacaatgcaaatgaaaattttttctcagttgagctgttgtgaaattattacacaaaacattttgaaggttatcaattgtaatgtgagagccaaaaccacgtgtgtgcaggcccatctttctggttggggattatactatttgatataaatcacctcaagaaatagccgtagatgagagaaataaacattttaattgttcttataatgaatgataagtgaagggaactataacctcaattgcaaatgttaacatttacaagatgacctgtttataaatgtagctctgccttatacatgtgctcacatccattttgaagtatccaaccagagcgctgatagattagtagttttgtgagctctagctgacaatccctgagcaaatctggtgaatttatcagcagccttgcaggacagaaagaaggaaaaaagataacagatgactgtgctaaacagacgtaatacataccaagggtggtagtctcttgggcagacatctttgtgattacttaccatgtccacttccatcacaaagttctgtcatccagatatagttggaaacaacctcctctgtggctatagagtagctgtacttctcttgtgtataattaagtggtggttgataacagtaacattacatttattgggtgcttaccaggtacctggcttgtgctaagtgccttacctatgtgtgcttaggaactagcattatcctcattgtgcagcgaagcaagtagtgggctaatagtgaagttcagcaaattttctgaagatcctgcagccatttaaaagaaagatgagaccagaaacgaggccagtgtaactccattgttcaagttttacggccacagactctatgtggatgcaggagggcttgggggtagactgagaggtgggagggaggagtgcagcctggacattatttcagaaagcaagctaacattaaaaggttaaaaacaaaattttgattgagtatattatgaaatggaaaaacttttgggattcttaaagtttgacaaagcttcataaaaaagatattaacaaagagctttgatacaataatttgataaaagaatttatatcttataagtaagatataaaagtgaatttgaggccgggtgcagcggcccatgcctgtaatcccagcactttgggaggttgaggcgggcagatcacttgaggtcaggagttcgagaccagcctgaacaacatggagaaacctcttctctactacaaaatacaaaattagctgagtgtaatggtgcatgcctgtaatcccagctgttcgggagactgaggtaggagaatcacttgaacctgagaggcagagattgcggtgagccaagattgtaccactgcactccagcctaggagacagagtgagactctgtctcaaaaaataaaacaaaacaaaacaaaaacaaaataaaacaaatttgagagaagcacattcatagaacttgccttgacattgtcctgtcataaataacaaataaggcaagcccagtggaggcagcaaatggagatgacgctgccaagaaggcctcttattttcaatcctcagttacagcaatcacctattcagttttgcaacattatattattgaataattgccctttttcctcctcttattctacctcaataaagttaaatgtttcgttttccttagcaaactccatatatatatatatatggacatacttttttgcaattacttttaattgcaaaaactgcaattaattacttttgtaccaacctaatgcacgcatatgtatatatgtacatttgtgtatatatgtatatatgtatgtgtttatatacctatacatatacatatatacatacatatgtatatgtatatctgtgaatatatgtagaaattctctctataaaacaaattctatctaaaaaaacacatatatgaattaaaacatatatgtgtgtgtgtgtgtgtgtgtgtatatatatatatatatatatatatatatatgtttgttttttataaagatgatgttttgctgtgttgcccaggctggagtgcagtggctattcacaggcatgatcatagcgcactacagcctcaagctcctgggctcaagcaatcctctcacctcagcctcctgagtaactggaactacaagaaggcaccatgtgattggcttatattatttaaactattcacttccaagtttctaagagccacatattttgtcatattttattcaaggatgaggaatgaagaagtctgtgtctgtatcagcttgatagttctattagatctttgatactcaaagcgcactctgtggatcagcagcatcagcacccctgggagctggttacaaacacagaactttaagacccatcccagacctacaagtggattaatttgcaaatttcattgttaaaaaaagctttcttttttagagttttagttcacagcaaaattgaaaggaagatacagagatttcccacacacactgctcccatgcatgcacagtctccaccttatcaacatccccaacctgggtagtttatttgttgtagttgatgagcttacattgacacctcattgtcaccaatcatccacagtttacattaggattcattcttggtgttgtacattctatgggtctggacaaatgttagtgatatgtatccatcactatagtgtcatgcagtgaattgcattttgaaaagctctatattagctataccattccagagattggggacctcccctttgtgcctttgaagttttccacacaaatcataatggcatcaataattgattaacctggaacaaggtgaggaagcagtccgtaaaaagcaggtggtacccctgctttcagaagtttccactgaactaggtatttcccgtcaaagagtaatcttcattcaggctaatggcttgtcataataaaattccattcagttactgaggaaagatttcttctgggcaccaatttcccatttgaaagtattacaagaaagctgtgtgtgcttatcctgaaatggggagcactgttactcaggccccagtggtataataatgggtgactgtggctgactcctcgaggataagccctgcacaagcttctgggggattaatttggtccatctgggttgagtcatatctggtttgtattacctgaatataactcagatctttgaaagcaaaggaattaatttagaaggaccactgcgatactgtagctgaactttacttattaatttatgtaattatatcactagttacaatatttagctatgattttatttgatctcttgtcttctcccattgaagcagtgattctcaagcctcaacaggcatgagagctcctggggggcttgttagcatgcaaattcctgtgcttcatccccagagtttctgcttagtaggtctgggctggaacccaagaatgtacattttgaagaagcccccagatgaggctgatgctgcttggtcaggactacttccctaaagaatttgcaaacaagggaccaatcatggtagtgagtaacttctttgtctcttgctccttttgtacaaaatatctgatttttctcctgcacttgtctgtatctgactcactggttgtcttcttctttagtttaaggcctctggaagcccagagataggaggcagggacgagtggagggcagttttctctcgactcttcctgcagttatttaacttctgtttctaatttataaggctttcttggcatatgtaagcctatgcagtcaaactgagttgtggtccaggagaggtcatggaccagtgtcagtcatgtgccacatcacagagtgacgtgagattcggagatgagaaaaatgtaaaaagaccctacttttttttcttggcctatcccaataaaatacttctgctcttaaagcctggtctcatgaatatttatttggtttggccccctactttgtgtttactcctaaaacggtttgggttttccagtgagcctgctgcctagacgggactctaggctaagttaagacatgccaacatagtcaactaagcagaatcccatgctgaaactctgggaagtgtttgaaatttattctctctccaggtgagggagctgacatgatgggccacatccctgaaggtcaacctgaaaccaggaccacactgtaacactgccacctctgcaacatacatattagtgcaaattggggtaaagggtggggctgatagaatgtagagtgtaatttaggaaccagcctatggtgagatcttgcaactgctggcaaagtccgagccactatcctttgagcaatccattcacaatggaaccagaaaaacaatgtctatttagccagaaaaaatttgaatggacaagagtgatgtctctttaccaatacaagagagataagattactaggaatagaagagttacatggtttctctgactgccttcacaaagttcagggtggctggaggtctctgaagaaaagcctggacatcagtgatgaatcaatctctcaaagcctcctgtagcaaacattgccaagggcctactggtaacctgtcagcattgaccttttcagtgcactcaattgcaatctgaaactgccagcagctccttgcttcacctggagctttctctcactgccagatccagatgtggcaagctggaagtgctgggatgtagcagctccactcccgttcccactcacagcagcctcagtcatgacagaaaggggctgaggtatacacgcctcagctccctcacctgcagagagaataaatttcaaacacttcccagagtttcagcatgggattcagctcagtggaccactgggtgtcctatctttcctctttcacttcctcacaccattatcggcatccgagacccctctcttcctgctctctattcccaactatgctgagctaagattgttgctgctgccacgtgattattactgttttctgtcttgatggggagacaacaaggtaggagcggccatgaacctaaggtcagatgacctttctggaactcagagttgttccagcggtaagctcttcatcaaagccaatgcttacgaaatttacatggctcaggattgtctgctgctggtgatctagaacacagcatttaaagacaaagaagtgggggcattgtaatgcttcctcccagtgacttgctggatagctaacttatgcttgaagttttctatcaggtacaaaaaacaagttaacatctacctagtaatcacgatgcattttaaaggtattgagtgaaaaaagtgatgagacattttcaaaaatttcaaaatccaattactttttcagtaaatatcttctaaaatgaaatctttatcatttctaatatttttcttaagagaatgtgaatcttttttttaccaaagatcgaaactctcaaaacattttcagaggcttcataaaatcgttatttgtgttggaattttatataccacccaaagctggatgaaatcaaagagccaatggctaggcttggaggtcattttaaaaactgcattttttcaccattataatatttattgcaatgggctaggccctacgcatcagattggcgatattattaaggcatcagaaggccaagaaaatctgaaaataaaatggtttcccaggtaaagccatggtaagggtaggcaaaactggcatcaggccaaccgtttcttaccatgcatcaaacttttgaggtcaggcaaaattgaaaacacatttggagaagttaattcaccttaattttgaaacccatgtgtatttcaagggaaatttaatccgtgtgtttctaattcatttacactcaattcatcaaaatgttcttttgatagacttatttcatttttttatctaggaaatattatgactctctttaacaagattcttgaaggcttgaataaaatgcctttaagaaattgtgtttggctatccataaacaggactaattaacagaggttaagggaaagcagtccagttctaaaacttggccccccaagattcaaggggttgtgctttttgctgtgttaacaccattgaaatggtggtgtcactctcttcagcgctaggtacctagtgattccatccactcatccaccactttaataattaattcctcagtgaatggttacactcaatgtagattgagctgacccttcactttcttcagggcatggagatctatccaatctaatctaatctaatgtaatctaatctaatctaatctaatctctatctagtctatcatctatctatctaatctatcatctatctatgtatctatctaatctatcatctatatctacatatttttcaagtgtttacatgaagacagatattatgggttggaattaatgggacagctgagactatggtttgagtcaatcagaagagcttggatgctaaatcttgctaggtaagagaaaccttgagaaagaagggtaaaaggaagtgggcaaagttacataatttatttaatttgtaatgaaacacagtggatagtattaattataattttacatataatttctgggataagaaacaaaagcagttttattaggtaaaatattagtctgaaacatggaaggaataaaactagattagttttcaatgtttgtatttctaatatgacaataataggactcaaaatcaaaatacatatgcaactcttgatgagctcagcgtgtggtgagaaaagtttcttcagtttccgaaagtgaaggaataaagcccagccttgctggagtttttgatttataaccagcaggggaaaataaatttgctgagcttctctttttgggcagcttccatgtgagggtggggactgccaaacaatagcagtcaattcaattatcatgaggaattacctattgtagagctagccacttcaccagccatcttttactagtgattttattttattatttttatagatttaggaggtacaaggttagttttgctacatggatatgttgcatagtggtgaagtctgggcttttattgtaaatgccacccagatagggtatatcacacccattaggtagtttctcatccctcaccatgctcccacttttctcagtctccagtgtctattatttaactatgttcatgtgtacacattgtttatgtctcagttctaagtgagaacatgcggtatttagtttttggcttctgagttagttaacttaaggcccttcaattccacccatgttgctgcaaaaaacacaatttcatttctttttgtggctgagtagtattccatggtgtatatataccatattttctttatccactcatctgttgatgggcgcttagattgattcaatatctttgctgttgtgaatagtattagtaattttaaatagtggtgggacaaagcccattaggaagagttcctttgaggggtttccagagtcaattaacaggacagagaatagcaggcacttcatttgtaacaggagaaggtatcactgggtttcacagagctcgtaacagaaacgacactgccagctactttagggcaggtggtaggagatgacagccaggttcttcccataggccacaaaatgacaattgctgtctctaaaatggccaacttgagtggactcttctccctcattcctcatagtaagtgaaaacttcatttcttttctttctttctttcttttttctggtggtagtggtggttgtaggacctctgaggggcgattcttttttttttcttttctttttttttatgagatggagtcttgctctgttgcccagactggagtgcagtggcatgatcttggctcagggcaacctccgcctcccaggttcaaatgattctcctgcctcagcctcccaagtagctgggattacaggcatgcacaaccatgcctggctaatttttgtatttttagtagagacagggtttcaccatgttggccaggctggtcatgaactcctgacctcaagggatccacccgcctcagcctcccatagtgctgggattacaggcgtgaaccaccacgcctggcctctttttcagaggttagtgaaagtgcttatctgatacttgccttattagctatgtatgttaagtattaggcaaacttgccaagtccacgtggatagccatattaagtctaaagacttaacacagatctaggtgcagagaagtacatgtggggcagagaactagacctggaagaacccacacaggcacattcctttgcctcgaggctgcttggagaagtatcagcctagtctaggaaacctgaaaacctaaaaaacacaactgtaagactttctctgtttgtttttaatgtttttctgattagaatggagaagttatccaaatatcacattacagtaagttctaatgatctgtagtttatccgtggagatggcattaattattggcatattaagacaatgtgtgagtttgaaaatcattgagtatctgtggcaattcctgtagaaataaatatgaggaaaatctgaccttaaaattttaaaaaccttaaaatttgagagttagtttatccacagaattttttttttttttttttttttttgagatagggtcttgttctgtcacccaagctggagtgcagtggcgtgatcttggctcactgcaacctctgcctcctgggttcaagcaattctctgcctcagcctcccaggtagctgggattacaggtgcccaccaccatgcctggctaattttttttttgtatttttagtagagatggggtttcaccatcttggccagctggtcttgaacttctgacctcgtgattcaccagcctgggcctcccaaagtgctgggattataagcgtgagccaccacgcctggccaacatttttcttttggtcttattttctttaaactatagaagatgcatgttgatctgggcttgaatttcaaatggctctctttctatgtaaacccaattttcttacaaaaataaaaacctctaatttcacatggtcaaaccaatacttaccttcagatatgatgaaatatgaaagttaaccaaggtagcatctataaagaccgatgcaaggcctggagcccagtaggtacttaggtccatctcacctctatgaatatacatttttgggggctctgtggttaggatagtcttagtttcatgttattatatgatgcttttgagaggtaattttgtgttaatgatttgctactcaattcagtcgccaaaataccttaattctcaattcaaatttaatcgtaaacatatggtttgctttttacttaacattatacaggaatgagtgtaagatcataggtttatatttttggaacatgctctggtgaccattacaatcagaataatttctgagtctttgttcagtgcatccacttctgcagaattgattggaagtaataaaatgctcttgtagatctttattttatatatatttgattaccttattaaaattgagaatgtgatttttattctctccatgatcagctatacaagtgtgcttcataaaatgcagagtttgcccaaattcaggtcttgctgccccgtggcttctgcaagcaccagttcccactaagctcatgatgctctaggtaaatggatattgaatgttggaagagcggctccattttgctgtagtgcccagtctgaaaatctgcagctgaatgaatgtgtcaatatgacatgtgttaaagtcgccgaccaattactacttgatgaagggaagggagctaacctggttggggccttagatctgctgtatcaggactcactcactcacaggctctcgtctctctctctctcacagtattgtgctaggaactctcaattggatagaaacttccgaccacagcttctctcctcaatcccagacccacatttccagtgcccatttcctcttattgctaagcatgtgctggtttatatgattgccacagtgggtaccagttatggtcatagccccttaccagcacacatgagaatggtccatgacccacaccagtgaggacccttacatctttgcaaagtcttatacctgagtcttaccttcagggattacaatctaacagatctaagagtgtggcctgggcatctggccatgtgctcctcagttgagtagctgggactgtatggcccacaaagcctaaaatatgtactgtttgtccatttataaaaaacatttcctgacccacgttgtgtagcccaaaagccaacctcccattgcctgtgtatactctgctgtcattctcacactacgttcactacgttcactacgttctccacacatttgctgttctttccagctcttcttattcattctcgagctttggaccataatagtctaaacacagaaccttctgtccttccccagatgattactaatactgctccagccttcacattcaacttcttgatgactcttcagtgaaggaagtagtatgagaagcctgcagttccaaccctaccccccaacactggctgtattctctagttcagaatatagaaatatatttttgagcatatacgtgtcttggagtgtcttttctagatttatgcaccctttacttgttatctcataaattgattttcccatcttactgtgtgctggatgcactgctgggtgctttacgctctaaacatagttgaccatcaatgtctcaatagcactcataagttggtattattaagcccactctatagatgcacaacaggggtacagagaggttatttgctcaagtttacaaagctagtaaatgttaggaacagaatttaaagtcaggtcaaccttactcccaattgcctactaaagaacttcatttacattgcatcaccagggaataataaagaataacttattttagttattctagtggaaattcttttgaaacattatacacacttctctgccatctcaattaagtcatattgaacatcaattaacctcttcaggactacttaatatcacaaatattaacaagttttatggtagtatagaaaaacatgaatttacaataagacaataaattattcctaacacgaaatctcgggtttgaaatcttgggtcaatcctactctgatgggataaaaagaaattagttgtacttttttgctgctattttattctttacctccattccttcactcaggtagacgagcttgtgtgtaaggtagaagtgaagcaactgagtaccgcattgccccatggttaagaagagagatttgggggcaacctaaaactaggttttggtcctggtcctgctactaattactgtgtaaagttaggcaactgacttagcctctctgagcctcaactaccccatctgcacagtggagttagtaacacactcacataggataatgtatcaggcacattggaagcttccagtacatggccattattattaaattattgaggatgctttttaactttgtaacctggagacttcacgtctcccctaggaggttgtgactttcaagagggcagacacactgtgttttcacaggaatattgtcagaactttcttgcagttgctagctcagtaaacatttgtccatgaatgaaagaatgaatgaatgaatgaatgccacatgaacacagacacaaagatgctgagttcaccatcaagctactctattgttctatgtcctgttttaaagattttgaagatgtgctcctcttttttttttttttgtggtgattgcaatttattcatgatatttcaattttccataaaatgcttgtgaatttcaggggagtatactgtgcacatgaacatcagccttccctcttatcacagaatccaaaaccatgaagcatgctagtactttgctgttacccagtagttttaacattctatttcaaggctttcatgaaagcataaaagatgttttactttttcttcctacctttgccccctcttttattttattttattattattatactttaagttttagggtacatgtgcacaatgtgcaggtcagttacatatgtatacatgtgccatgctgctgtgctgcacccattaactcgtcatttagcattaggtatatctcctaaagcgatccctcccccctcccctcaccccacaacagtccccagtgtgtgatgttccccttcctgtgtccatgtgttctcattgttcagttcccacctatgagtgagaacatgcggtgttttgttttttgttcttgcaatactttcctgagaatgatgatttccaatttcatccatgtccctacaaaggacatgaactcatcattttttatggctgcatagtattccatggtgtatatgtgccacattttcttaatccagtctatcattgttggacatttgggatggttccaagtctttgctattgtgaataatgctgcaacaaacatatgtgtgcatgtgtctttatagcagcatgatttatattcctttgggtatatacccagtaatgggatggctgggtcagatggtatttctagttctagatccctgaggaatcgccacactgacttccacaataattgaactagtttacagtcccaccaacagtgtaaaagtgttcctatttccccacatcctctccagcacctgttgtttcctgactttttaatgatttctattctaactggtgtgagatggtatctcattgtggttttgatttgcatttctctgatggccagtgatgatgagcattttttcatgtgttttctggctgcataaatgtcttcttttgagaagtgtctgttcatgtcctttgcccactttttgatggggttgtttgtttttttcttgtaaatttgtttgagttcattgtagatgctggatattagccctttgtcagatgagaggttgagaaaattttctcccattttgtaggttgcctgttcactctgatggtagtttcttttgctgtgcagaagctctttagtttaattagatcccatttgtcaattttggcttttgttgccactgcttttggtgttttagacatgaagtccttgcccgtgcctatgtcctgaatggtaatgcctaggttttcttctagggtttttatggttttaggtctaacatttaagtctttaatccatcttgaattaatttttgtataaggtgtaaggaaggggtccagtttcagctttctacatatggctagccagttttcccagcaccatttattaaatagggaatcctttccccattgcttgtttttctcaggtttgtcaaagatcagatagttgaagatatgcggcattatttctgagggctctgttctgttccattgatctatatctctgttttggtaccagtaccatgctgttttggttactgtagccttgtagtatagtttgaagtcaggtagcgtgatgcctccagctttgttctcttggcttaggattgacttggcaatgcaggctcttttttggttccatatgacctttaaagtagttttttccaattctgtgaagaaagtcattggcagcttgatggggatggcattgaatctataaattatcttgggcagtgtggccattttcatgatattgattcttcctacccatgagcatggaatgttcttccatttctttgtatcctcttttacttccttgagcagtggtttgtagttctccttgaagaggtccttcacatcccttgtaagttggatttctaggtattttattctctttgaagcaattgtgaatgggagttcactcatgatttggctctctgtctgttattggtgtgtaagaatgcttgtgatttttgtacattgattttgtatcctgagactttgctgaagttgcttatcagcttaaggagattttgggctgagaaaatggggttttctagatacacagtcatggcatctgcaaacaggaacaatttaacttcctcttttcctaattgaataccctttatttccttctccttcttaatttccctggccagaacttccaacactatgttgaataggagtggtgagagagggcatccctgtcttgtgccagttttcaaagggaatgcttccagtttttgctcattcactaggatattgacggtgggttcatcatagatagctcttactattttgagatacgtcccgtcaatacctaatttattgagaatttttagcatgaaggttgaattttgtcaaaggccttttctgcatctgttgagataatcatgtggtttttgtctttggttctgtttatatgctggattacatttattgatttgcatatattgaaccagccttgcatcccagggatgaagcccacttgatcatggtggataagctttttgatgtgctgctggattcagtttgccagtattttattgaggatttttgcatcaatgttcatcaaggatattggtctaaaattctcttttttggaggtgtctctgccaggctttggtgtcaggatgatgctggcctcataaaatgagttagggaggattccctctttttctattgattggaatagtttcagaaggaatggtaccagttcctccttgtacctctagtagaattcggctgtgaatccatctggtcctggactctttttggttggtaagctactgattattgcctcaatttcagagcctgttattggtctagtcagcaattcagcttcttcctgatttagtcttggaagagtgtatgtgtcgaggaatttatccatttcttctagattttctagtttatttgtgtagaggtgtttgtagtattctctgatggtagtttgtatttctttgggatcggtggtgatatcccctttatcattttttattgcatctatttgattcttctctcttttcttctttattagtcttgccagtggtctatcaattttgttgatcctttcaaaaaaccagctcctggattcattaattttttgaagggttttttgtgtctctatttccttcagttctgctctgatcttagttatttcttgccttctgctagcttttgaatgtgtttgctcttgcttctccagttattttaattgtgatgttagggtgtggattttagatctttcctgctttctcttgtaggcatttactgctataaatttccctctacacactgctttgaatgtgtcccagagattctggtatgttgtgtctttgttctcgttggtttcaaagaacatctttatttctgccttcatttcgttatgtacccagtagtcattcaggagcagagtgttcagtttccatgtagttgagcagttttgagtgagattcttaatcctgagttctagtttcattgtactgtggtctaagagacagtttgttataatttctgttcttttacatttgctgaggagagctttacttccaactatgtggtcaattttggaataggtgtggtgtggtgctgaaaaaaatgtatattctgttgatttggggtggagagttctgtagatgtctattaggtccgcttggtgcagagctgagttcaattcctgggtatccttgttaactttccgtcttgttgatctgtctaatgttgacagtggggtgttaaagtctcccattattattatgtgggagtctaagtctctttgtaggtcactcaggacttgctttatgaatctgggtgctcctgtattgggtgcatatatatttaggatagttagctcttcttgttgaattgatccctttaccattatgtaatggccttctttgtctcttttgatctttgttggtttaaagtctgttttatcagagactaagattgcaacccctgcctttttttgttttccatttgcttggtagatcttcctccatccttttattttgagcctatgcgtgtctctgcacttgagatgggtttcctgaatacagcacactgatgggtcttgactctttatccaatttgccagtctgtttcttttaattggagcagttagtccatttacatttaaagttaatattgttatgtgtgaaattgatcctgtcattatgatgttagctggttattttgctcgttagttgatgcagtttcttcctaccttcgatggtctttacaatttggcatgattttgcagtggctggtaccggtttttcctttccatgtttagtgcttccttcaggagctctattagggcaggcctggtggtgacaaaatctctcagcatttgcttgtctgtaaagtatttgatttgtccttcacttatgaagcttagtttggctggatatgaaattctgggttgaaaattcttttctttaagaatgttgaatattggccccccactctcttctggcttgcagagtttctgctgagagatctgctgttagtctgatgggctttcctttgtgggtaactcgacctttctctctggctgcccttaacattttttccttcattacaactttggtgaatctgacaattatgtgtcttggagttgttcttctcgaggagtatctttgtggcattctctgtatttcctgaatctgaatgttgccctgccttgctagattggggaagttctcctggaaaatatcctgcagagtgttttccaacttggttccattctccccatcagtttcaggtacaccaatcagatgtagatttggtcttttcacatagtcccatatttcttggaggctttgttcatttctttttattcttttttctctaaacttcccttctcacttcatttcattcatttcatcttccatcactgataccctttcttccagttgatcgcatcagctcctgaggcttctgctttcttcacgtggttcttgagccttggctttcagctccatcagctcctttaagcacttctctgtattggttattctagttatacatttgtctaaatttttttcaaagttttcaacttctttgcctttggtttgaatttcctcctgtagctcagagtagttcgattttctgaagccttcttctctcaactcatcaaagtcattctccatcgagctttgttccattgctggtgaggagctgtgttcctttggaggaggagaggcactctgctttttagagtttccagtttttctgctctgttttttccccatctttgtggttttttctacttttggtctttgatgatggtgatgtatagatgggtttttggtgtggatgtcctttctgtttgttagttttccttctaacagacaggactctcagctgcaggtctgttggagtttgctagaggtccactccagaccctgtttgcctgggtaccagcagcagtggctgcagaacagcagattttcgtgaactacgaatgctgctgtcggatcgttcctctggaagttttgtcttaggggagtaactggctgtgtgaggtgtcagtctgcccctactgggaggtgcctcccagttaggctgctcgggggtcaggggtcagggatccacttgaggaggcagtctgccccttctcagatctccagttgcgtgctgggagatccactgctctcttcaaagctgtcagacagggacacttaagtctgcagaggttactgctgtctttttgcttgtctgtgccctgtccccagaggtggagcctacagaggcaggcaggcctccttgagctgtggtgggccccacccagttcaagcttcctggctgctttgtttacctaaggaagcctgggcaatggcaggcgcccctcccccagccttgctgctgccttgcagtttgatctcagactgctgtgctagcaatcagcgagactccgtgggggttggaccctccgagccatgtgggagatataatctcacagtgtgccgttttttaagcccttcagaaaagcgcagtattggggtgggagtgatctgattttccaggtgccgtctgtcacccctttctttgacaaggaagggaactccctgaccccttgtacttcccaagtgaggcagtgcctcgccctgctttggctcgcgcacggtgtgctgcacccactgtcctgcgcccactgtctggcactccctagtgagatgaaccccgtacctcagatggaaatgcagaaatcacccgtcttctgcgtcgctcacgctgtgagctgtagaccggagctgttcctattcggccatcttggctcccctgccatgtgctcctcttttataataactcactgagtggagagtgtgtgtgtgtgtatgtgtgtgtagctcatggaacaggcttgtgaacctgccctacttcaccctgaggaagttcaccagattctcatcagcagtgcctggccagccttccacatgtgtctggagccattggcgtcagttggagggttgaatgctggtcaggtgctgtgtgctggtgacctaggacagggtcaggtgaggaatgtgaatacttttaggatggggcctttcctcctagatgtttctaggtggtggtttccttatgaaatgacgacaccccagagtcatgaccaaaggctcatcacagtcagcttgaaggatgccctgtgtcagctcctacttctgccccactgttgggctggcacctacttcttctgaaagacacgcctcgggtgtcccctctgcggtggcacaaagtggctctcagtgaaccttacaataataaattataaattaataagtaattgatagattgaataaatgaatgtttggagagttcgtctttggttagatacattttcaatatgggtttatctgttgatcattcagaaataaaagcgatatttaactgtgtctcttatttggacccttaaagactcaatccagaggaagatcaacagaatccatgtacaaagttttgaggtcccctagagtctccatgttgaagactgcactgcccgactaacactgtggttagtgtgactgaggagctgaatttgcaagttatttaattttaatttttttaattggaatttaagaaccaatactcaatttagtcattggaaaacttctaagtatatttagaacaagttcagcacataaatctactttttcaaatgtaaattttatgaaacctaaataccaatcaatatttctgacgaaacttcatcctaattgagatgtgctttaagtgtaaaagacttaccgtatttctaagacttagtataaaaaaagattataaaaatgtgaaatacctcaccaatattttggaggttgattacatgttgaaaagttaataatttgggtatattaggttacatttattataaattagtttcatcttttttctttatttaatgtggcttctggaaaatctgacatgcctgtgtggctcatgctatatttctaggtggtagtgctgcacgatttgcatgaggctgccatgttgggatgctgtggtagatattgacgaatgaccttgcgccaacaccagggaatctttagttaaaatttcactctggaagcaggaagtttccttggtggactgtatttctttgctttttgtcggtgtttgaatgagaatcagaagagtcttaaacttgtgttataaagcaagatgacactcatgatctcaggagggtcaccacagattaagcatttacaaagggctgggcactgtgcaaggtattttaaatcttatatagcattgtacagcaaccaaccctacaagatagattccattattattccattttacagaaagggaaagtgaggctcagggcagttaagtgatttgcccaggactcaatgcataatttgaatgtatgtttgtctaactcaaacccttccttctctgctgctcccactggaagaaggatccctttgaaagagggagattaatcaagtaaccttatttggtgcttttttctgttgtgattctagctatagaagcccagctgtttcttttatgtcacttataccttagccttagatcagaggtttggggtgagactgagttgggttcaaattacagaaagttgtttagccttttgattttcagctgtgtcatgttgtaaaagggctcatcatagctacagctctgaggcaagagggagtggattcatgtggtctctccatctcggtcctggctcattgctttatagacgaagttctgctgatttacctctcatgaggtcaaaagataattcccagaatataagtgtatttctgtaatagtcctactgttaaatttccatctcttagactttgaagttaatggccatgagtgaatttaaaagaatatctagttgcttcaatgcttaggttttggaacttcagaagccttagctttacttctgcctttagcattgaaacaataagaaaaacaactcagctactcaaaaccacaccgagcagcacttcaccaaccctcccccacagcagatggaaggaagagaagacagagctggagctgaaaggcagccatgtggtgaggtcaggcacctccagctttcctgaactctgttatcagagcaaagtgagagactcgtttcaagagaaaacctaaactcaactcaaccctcctctcctctcctctcctctcctctcctctcctctcctctcctctcctctcttctcctcccctcccctcttttctcttccctccctcctttccttccctccttccttccttccttctttcctttctctctcttctttccttccttcctttctttctctttctttctttctttctttctttctttctttctttctttctttctttctttctctctctctctttctttctttctttctttctttctttctttcttttctctctctctctccatttctttctctctctttctttctttctctctctctttctttctttctttctttccttccttccttccttccttctttccttccttctttcttttttttctttctttcttctctctttctctctctctccccccacctctttcttttaccacataagcctcagtattcatgagagctccatggagacagaaatccatccttctcctatacacacatttggcatgtttgaggcaattttagaggtcacttctccgatcccaccttctacaagaggaaaacgaggcaccacaaggttgatgactggccctggtgcaggctcataggggaagtgggaccagaacttgggtctcctgatcctcctgttggtgctccttcctctgcacccttcggcctgcatgcatgtgcagggatgtgtgtgtgtgagtgtgtgtgcacgtgcatatgtgtatgtttgtgtgtttatgtgaattttgaaccatttgaaagtgagctaaagatatcatgcactctgccctgtaaattctttggtatatattttcaaagaacaaggatatccctttccataaccataatagttaccaaatcagcacatataacatggataaaacactgttattcaatccacagactgtatttaaattttgccatgttgttatactttatcgttatgttctgtctcttcagtctgctttaactttggccacttcctcagtattttttgtctaacttaaccttggcatttttgaggtgtgcagaccacttcattttacagcatatttgtccatttggctctggtcattggagtatctaaataaataatgagaagtcctggtcccaggtataatggagtgagcacatttcactcatctctctcactggatgtggctataaaacctgaacataaggcacagggtggctgtgaggactctgaaaagtgactcaaaaaacaaccagaatttaaagtgccaaaattagtggtgaatttaccactttttcctctgttccttccaccccttggccttggatgcatagttacagaattgcatgtcagaacagtgttttagaagacctaaaacagtacttgagggaactggaaaatcatgggaggttatggagagagaggcgcccaggagagtggtccacacagttgacatgggtctgatgtaataagcgtgggggatgctgagagcagagcaggagacagatcactgcctaggcctggaccagctgctaggggcacgtgcctgtgatagatgtaaagaacactgccaaggctttttgtttctttggattaaaaaaattaattagtagactttatttgttacagcagttttaagtttgcagaaaattgagtagataatactgagtttccatatgaccctgcttcccccactcatggtttccattatttatttttattttttatttttttgagatggagtgcagtggcgctatctcggctcactgcaagctccgccccctgggttcatgccattctcctgcctcagcctcccaagtagctgggactacaggcgcccgccactgagccagtatttttttttgtatttttagtagagacggggtttcaccgtgttagccaggatggtctcgatctcctgacctcgtgatccacccgccgtggcctcccaaaggtttccattattattatcatcttgtattggtgtgggacatttgttacaattgatgaaccagtgatgatacattattattagctaagggccatggtttacatacattaggattcatttttttgtgttgtacattctacaggttttgataaatgcatgctacatatcaaacattacagttccatgcagaattcttacactgctctaaaaatccctcttgctgcactattcatccctccttgaatctcaaagtcctgacaatcactgatctttttactgtctctatagttttatcttttccagaatgtttcatagttggaatcctataatatatagtcttttctttttggcttattttacataacaacattcatgtaaggttctttctttctttttgtggctttatagctcattgattttaattcctgaataatgttccattatatggatctagcactgtttgtttattcattcttcagttgatagacatcttgcttgatcccagcttttggcaataatgaataaagctgatataaacatgaatatgcagatttttatgaatgtaagttttcaactcactttacaaaacaggaaagaaattcctggatggtatggtaagaataagtctaattttataagaaattgccaaactgtcttctgaagtagctgtgcaattttgcattcccaccaggaatgaaggagaaagttcttgttgctccacatcatcactatcgtttggtattgttgttttttttgtatttttttgtcattctaattagtgcgtagcgatatttcattgttgatctcattgttaattccttaatatcatgatgttaagcttctttacatatatttacttgccatatgtatcttccttggtgagctgcctattcagatcttttacccatttttcaattggttgttcatttcatttcttttttttgagttttaagatttccttatatattttgtatacaattcctttattggataagtgttttgcaagtattttctataagtctacggcctgttttttaatttttaaatagcagagcagaagttttaaattttaatgaaatttaacatcagtttttcatggattatgcttttgatgttgtagctaaaagctcatctacaaacccaagttcagctatattttctcctatgttatcttctaaaagttttatcgtttagatttcatatttaggtctatggtccattttgaatcaattttgtgaaagttgtaaactttgtgtctagattttgttgtatgtgaaattacagttgttgcagctccatttgttgaaaaactatcatttctccattgaattgcactgcaaaagctttgaaaagtgaattgacagaaccacagctctcaggtggtgaattggaacagttgcctaattttatcaggtcaatttgccactaaaacaaaaatattaacattctgtatggaattaaagcaagatcctgagttttgtaacacaagaaataaaatgtctaagattcacttcaaaattactcatcatatgaagaatgaggaaaatctgtgcttgcaagggtagacagtcaacagatgacaacacacagatgctggaactgactgacaaaggttttaaagcagctactataaaaatgccccaagaagcaattgtgaacactattgaaataaggggaaaaatagaaagtctcagcaaacaaatagaagctataagaagacctaaactcaataaaagggcttaatagcagtaaggagaagaaagacaaaagtcagtaaaattgaagatagacaaaaaaaaaattatctaatctgaacaacacagaaaattttagagaagaaaaaaaagagagcctcatgggctgtgggacaataatgaaaagtctaatattcatgtcatcagagtaaaaaaagacaggagaaagagtctggtgtagaaaagtatttgaagaaacaatgagtgaaaacttttcgcattggtaaagagaaaaatgtaaagattgaagaagctaagcaaacccaacgcataataaacccaaataaatcaatgcctagatacattgtaattaaagttctaaatataaaagacaaagaaaaacctggaaaacatccaggggaaaatgattaagtactgggttatttgagaaaccatgaagaccagaaggaagtgacacaagttttcaaatgctgaaagaaaagtcttatcaaaccaggattttatattcaacaaaaaattccttcaggaatgaaggattaacaaagatatagtcaaatgagggaaaactaagagagtttattgccatcagacctgtgctaaaagaattgcttaaaaaaattcttcagacagaagggaaatgataagaaatggaacttggaacttcaaaaataaaagaagatcaacagaaatagccacataaatagagtagactatttttctccttttgagttcttttttccttttttctatttgtgtaaatttagggagtacaagcacagttttgttacatggatactttgcatagtggtaaaacctgagcttttaatgtaaccaccacccaaacaatgtcatttgtacaccttaagtaatttctcatccctcaccctcttcctactcttcctcccttccaagtattcagcctttattattccacactctatgtccatgtgtacacctttttaaggccctatttataagtgagaacatgtggtagtatataactatattccatggaatgctactcagccataaaaaaagagtgaaatcatgtcttttgcagcaacatgggtggaactagagaccattatcttaaatcaaataactcagaaacagaaagccaaatactaccacgtgttctcacttataaggagagcagaggaagacagattaccccaagaatctaggatatgggtgcaaaagaaaggatggaatcttcaactccaaaatgcagcatcaccctgttttatctaagttatctagtttaccagcctggagttatctgtagtatgtgatagtatagtatagcatacattttcccccttttagtatctacatggtttgtaatgatttcccctctttcattcttggggtaatctgtcttcctctactctcctgacacatactttgggcagatcccacctctaggtacagaatgtgattggcaattcctgtggaccaatctgagcattgctttcacttggctgtcctgattgctttgaatggagagagtaaggcgcatcaggcagatacaaagcattttgctgagattactggcactatataaaccctgcactcccagggagcagtagaaatcttgagaatggatccattagagtgtaaggcagacgttaaagatggagaaaccaacttctaatgacagcttggagcatctggatctagtcccagactttttagttatgtgagtcaatactgtcattattttttctctttactttttaattaaatcagtgaattggattttcagttaatagcaaccaccagtcttaaatgatatgatagcctatgctttgttaggttttgttgaatgtataagtctctcagtgttggtattagaatccattattttccacgtgtagtggttagattttactaatgatgtgtattccatagtcttacttctgcaactatttttatagataaaaggctttaaaccttttaaaagagtagtatccgttttccgttttgtttaaaaacagaacaaagacataaaaacagataatggtatgagtactgcagttgaaatgcaattagggattctttagcctacttggtctttacacctcttgccctgttccccatccctatgtggcatcacaagaaatcttacagcctgaaaaatatggaacataaaacactgttctgtcatttatcatacaaacagggtcaatttcgagaataaaagaagacattcttaataaatttattctgggaaaaagtcttaaacgggtgataccaggaaaattgggacatacggttatcctggttctataccacaagagttgaaatgagaggaaagtatggttaagtgagaagaaatggattccagccccatttctatcatccacgagctgtgtattcttaaaaagttactcaacctctctgagcttcagttttcttcattagtgtgtcagagagaatagtaattactacctcactggaggttgttgtagggtcgtagttatgaaaggtcatagttatgaaagatcatagttatgaaagtgctttgtcaaccataagacacaatgttactagtggcttttattgtatgaactaaccaatctaattatgatgactctaacaatgtggttgtacttaactttacacaatagatgaattctcagaaaaaaagttgagtatgaatgattttgtaaattgtctcttacttaaaaagctcacatgagacaaaattgtctgagaaattcttctataaagttcagaattattttgtagaataaaagttaccccatgcttatatcttatatattagaatttgcttttaagcaaaacatatccctaatgtcttcaaggatttgtctctccagctaaatgtggagaatgaggcatttcataaatgttagattacctggccaggatgcaagctggggctagggttggagcaggaggcccttttcggggcccaatatggccatgaaaaaaaaaaagacaacataaattcttgcaaagcaggaccctgtcggtttaatttatttcacatttgccctggaagcacgaggctccagtgggctaatgagtacgagatgctgttacagacgagaggcaacctatgcatgctgcttgtatgactggcacccaaataggcttgctgggttggtgcactgtcaggtttccaattctttcgatgtgtctgtagccttggtctggccaggtctgccttgtcctcctggatggacatttaggaaatgcatcctaaccccatcagcacagtcatgcactggtcttcttttcccatatgtgtgtgccgccatctgggacaacttagccattgtctgttagggcctttgatgcttgattatagggaaagaggaaaacatcagctacaatagagcaatctgttctgtttgggacatcttacaatcttttttcctccttttctttttttcaatgcacatatttttgatcatcttcacatagggatgtatattggtaatggaatgtattctagaattctttctcttgaaaggaatgaagctctccatttaccctgtgctcataaaatagttttgcaaatatgatcttgctgataaaacacttattccacttctcttatcctctttttgcttacagactgccaaaagaatctaagatttcaaagcataaatgctgataacatagttttttcattgcttttgctctgtatttccgcagagcttattgtttgttgttttcagtggtaaaactttcatcttcaacaatagttagattaatttaaaaacatctttacaatggtatattgtaatagatattagcaaatttcttggagaaatgttgtattcaaatagaaccaaatctatactgtactgttaagtgtatgtgttaaggttgactaagttccaaggtcatatatactttgtaattttattttggtagaaaaataataactaaagtgatgtacaccaaataattacaagtcatggtctctgtgggatagaaccacaaaatgtttttctttctttcccttctttttttgctctctctctttcctctccttctgtttgcttatttgcatttttgaattattttataacaaaattgcatgacatttgtaataaatcccactctataaaataagtttaaaaacataaaggaaagtttgacagtctatgaacttaatctccacccagaaatggagtgctgtagtaaggcccactcaagataacgatggcaatgggaagctggagtgacagatggcacacgatggcaaacagcccatacacgttagtgctttctgtggaaaataattttgtatatatataaatatcttttataatttaggaatttccacattattaagtcaggatagccagtatagtagagatacaggtgtccaatatccctttcatccttcttcctttagtaatagtttatctgagtgtatactgagtgtggtcccttgtccaaaggaacctttaaagtggtggtggtcacatgctaaacttatagtcagaggtatgtgaatggcgatggtggatatcacctctcagtcatgctcatatctttccttctgtcccttgtgctctgcacatggcagtgggtgctgaagcagccacatgagaccaggaggtgcaatctaatcattgaggacagcaaagcgagaactaatgaagttgagtcattgatgctgttgagccaccacatcagttcagaattgcctaagcctgtgtatttaagcaagcaagaaagaaatcttatcttgtttaagtcaccattggtagggtttttttttgttataaccattgaatctacatcctaataatagtatattatattactataattttacagtatataataatataattttataacataatatgtagatagacatagataaatatatggatggatggatctatagatagattgatgaatgaagggaaaggtggatggatagatgaatgaatggatgaatgggtaagtggatggataggtagatggatgacagatgaataaatggtggatgaatggatggatagatggatggatggatggatggatggatagatgaatgtatgattagataggtggatgaatggacagatggatggtgatatggtttggctgtgtcctcatacaaatctcaacttgaattgtttctcctggaattcccacatgttgtgggatggacccagggggaggtaattgaatcatggggccagtcttttccttgctattcttgtgatagtgaatacgtctcatgagatcttatggatttatcaggggtttccacttttgtttcttcctcatttttccttgccgctgccacgtaagaagtgccttttgcctcctgctatgattctgaggcctccccagccctgtggaactgtaagtccagttaaagctctttttgttcccagttttggtcatgtctttatcagcagtgtgaaaatgaactaatacggatggatagaagggtggagggatagatggatagaatgggtggactcaatcttgttgcccttccttttcttcaccctgtttctctaccctctgcaggaagagcccaccttacttctcagtctaagaaagtggcaagcactgctgggctctttccacacctgtagttcctcagttttctgaaacataggttgtgtgtttctaatctggcaaagacttgaaggaaaaaaaatcctttttaaagtcattgtaaacagatattacttttatttcagcaatttgccttggtaaaattcgggaattgaaatgtaaataaccggttatgtacaaatttgactggttttggggccaaacctgtatagctggtagcctgcacggattccatgagggttacttcctgtgccagtccaagtgcacagcacagggcagagcattatgaacacataaaaacaagggaaaagtcagagagagggaaactgaacagtgaagatgcagaggagtaagagagtcctgggagcaagtaaccagagagggagttgcggcagcattcagcctagagggcatgataggccaaggcatagagataggaagtgttgaacactggacgctgtgacagtgagggcagctggcctggctgaaggaagagtttatgtgggaagtggaaggaaaagtccctagaaggctgaaggcaggtattgagccaccacggatagacagaggatgccacctgaatattatttcttctatatatcaggactgtagctctgttaaatagattccaaaactcttgttttcatgcagatatctttttggaattgtgatagaacatgaggctataaaattccaagccaagtgttctaaaatcctcaagaccatatacagactaagctttgtgtacatggtgtcaaaacaggcaggtcaaaccactttattgcttgcatagcagacacagccaggaagcttcccagccaggaagcaaaaatcataagctgtttttctattccttttcctgcatagcatggtggctggagttctagttctcatttaagttcctcctacttaactggtggaatccaagtaattgatccagtatcatctatcaccacccttcttgtccttgtgctctgccaggttgctgagggagtgtcacatcatcccaaagactgtagtcccagacctgctgtgcagaggctccaaaaccatgctctgactgggctttcacctgattgccaaaggggctttctctccctcgctgaagaatgtgcctcctttttcctccttccttctgaccgacaaaggaagcccctttctgatcattaaatggctctgttaaattataccctttagggcattttgtttttgctgggtgagggagcaggggtagtctttttctctctttccaaataacggcaagggcagttcctcaatgtcctgaagcttccactgacatttggaccctaggtctcttctctctagattgagcaacagatgtgacctatgttttgtagggtttcaccatgcagataatgtactaaccttacttacacaaaaccacatttttatttgtgtactttttgattggttgtctcagtaggcatcagatcacttgttgcggcgtgttggggggagcttgttgatgcacagatagtggggttccatcgccagggtttctggttcagaaggtctggtgtggagactgagaatttgcatttctaacaagttcctgggtgaactgcagaattacattttaagaacaactgttcggagcacccttgccttaataatgctgcagagactttctgggctggtccaggtgtcttgtggctccgcttctgctgtgtcaatttttgaacagcatgtggaggaaagatgccctctccagggtgtggtgaggagtgaggacaatgtgggcatgtctgagctgtagtgggcatgggtgattcagcaaggactgactggacaacagtgtcccttcttgagagcatcccagcaggctaggcagcagagctattaaataaaaatccgtaggaaacattgacattggatccctcctgaatgtttgttctacaaatgtggaatgtttgtctcatccagaaacctcaaaattactttgccattaacacctgtgtgagtggcagggcttgcatcattaagattgccggaggaaaacgctgcctcaccttggccgaaggaagcattaaaaattaatgaggtatcagtactcacagtttgataaactacaaaacacctccttatgcctccactttttcagttgcctaagcctctgatacatctatataagacattttagaagaccaaatgtcaactgtagagctatgaatgtcaacagaaaaatgaaaaagagaaaaaaaatttgcattttttttgcagaggattgtgaaaatactatgacatattttatattttttatttgaagggtcatgtggttcagaccacacatgggtatttgcacttgctgcttgtaccaagtgaatcagatgggatggtaagagtaatttcttggaatgttttagcagcagtgagggttacaggcagatgacctgggagctagtctctgctgtttactcctctggctctgagatgccttcaggaaagttctgtgttgtgacattctagagacagcttgcctctagaatactgtgacatgccacctggaagttttgtaggtctggaaatattcacaacgtgtgcacattcagcattagactgtatgtggccgttctctctgtcataagggagtatatgcaaaaactctcagatgtctttgttctgctctgtggtctgggctgggacaattttgatgagctggcagcctaatgttttcttgattcttatttatagctcaaatctctttatgggtgctcttcaggggtatcttttcagggttcttggtcagctggtaagtgttacaataatatctcttttgaatatgtaactattatgcattatatgtggctgctattaagatggatactaattattgttctcagatcttttcaaatatgagctcatttactcctcaaggcaatccaatgaagtcagtgccatttttatcaccattttacagatgaggaaactgaggcactatctgtaacttgcccaaggtcacacagctggtaagtggcatacccaaggctagaacccatgctcttaactactacatgaaactactgattgcttttctgatgagcttcaactggtagaagccactcgcgtctactcacaagcttgttactgaacccattggggtcaaaagcacatgtgtgtttctgaacagagaggtgaagtgagtgggctcatcttaaaagcttgtttccattgctttagaatcaagtgcaaatgctttagtaaagccttctagcacttttctcaacatttctgaggttctctcccaagcctccctccctaaccacataagcttgcccaaagcatgctgggggcatgatgctctagaccattgctcataggtctcttcatctagagctggctcctgtctcgcactctatttgcacacctttgctggggtgaatcatgttctagagtgtcccaatttgaatgtcagatctggttacagatacattgagataatggtccctgaaccctgggcaactgggcatgttctggggttgctggagtccttgttctggtcacttccagccatataaacatacttttttctttgctgaggaactgatctgtgctgaggaatgccacatctgggctctgttgaagaaggtaggcaaacagaagagagagatggggcatttcttcctccactccctccctgccttggggtcacaattccagcagcagttgtacccttcccttctggtgggcacttcccctgcagccctcttccttagctcctagtatctcctagggcagtaatagctccaaactgctccaaactgctgttagtctttgggggcctcccaacccttgttggtttactctgcctacattctgtcttgccaccccttggacagcatttctacatttgaaccatatgggtgaattccatatccttctgggaccctgacccatgaaactccttcgtcccaaactatgtctgagctttgtcctccaactcgcaaatggccaccagcagattttcctactcagctcacacagcccaggtccccacttattggatggaacacaagataccctttaaatcatttgaatcacaatgcagacttaagagtccatcaaattcttgggaaggggcaatgtgggattctttctcctccactttcccaccatactccctttgtggcagatcacaggcatgtgtacagtatagtgcagattctccctttatccagaacacaacccaggggcctgggtcttgttttacttcccttaatgtccatgtggttattgatgccgctgtcttccctggtaatctatcagctccactagaggagaatgggtatctctaggactagttcaaaataagtacttcttaagtgaatgaaggaaggaaggaaggtaggtaggaaggaaggaacaaatgaatgaaatgcagctggcacaagttggggtccatcgtttagtcacagaacaaacaagcataagttgttcccaccctgatcctcaaaaacttcaaaatggagctgtcctccttttatgggccctgaagcaattcagaggcctcgttctctctttgatatacttccctcattgccaggtgacagtccggaggacaacgaggcattgagtgccttgccccagctgggcaagctgctgagcagagaagtcagcattcccgacatcctgcccggctctctcttgactaaaccgcatgggctgtttttctttgctcttgcttggaccactgggctcttcttgactcagacaccactgatccctttcccgggatacacacccacctgctccctggagccaagttttgtgaggcgtgtggcttttttttggaatgcttggtcaccttggagctcctgcctcatcccaggacaggaggatttgtgtagataaattatcaccatgggagaccagtgtgtgtccccaagccttcagtgcagttcagacacagtgggtttcctgcaactcacttttgctatggcgacttttgttatgcacagtgaacaggaagtagaaatttgcagaatataagccttcttcacaggaaacgtattttggagctcaccacaccatacaggctgctgatttaatacaaccaggatatgtgcaaatctccgaggaatggcaaatgccatccaccttcacttttttcaccttccttctcctcctcctcctcaccttcatttttcaataacccaattatttgctggtgcatataaaagtaaacagaaaatgaataagctgtggactttgaaggatagtttttgagttagaaatctgaagggggagaaaaggccacagaaacagggtaaacagttaaggcaaacattttagaccaaaatagccagtagacagcagctgagaatggacctcactgctggtaaagaggcccaagtggattaaattgatcaaaacagtgtttgggagatagcaaggaattttatttttcattatttctcttcaaaaaggcatgatggaagattagacttctctaagaacaaacgtttgaaacttttctattgctactgtttctgtgctttgcatttgatgttggttatgaaacgtgtttttctcagtatagatatatatgtatatttttatacatacacatacatatatatattttttatacatacacatacatatatatatatatatatatattttccttttcttgttgaaccatgatagtaaaaatgattagtggagttgaaatctgcagcaatgcacagaatgctttttccagtgtttaggatagctgaaatatgcaataattgattttaacatgtgctgtaattggttccatatgcattgctgtcaactatgatgcatcataattaaactgacatgttcaaaacctggccactgaaatgagcactccctgcattttccaactgtgcacagcttgctgcttctccactccctagcttctcaatcaggaaccacattgccgggttttattttgctgctggtctcctctatgttttatctatttttccccctcagattttaaatgacctcctggagtggattcagggtctttccccaccttcattttcagatggtcacattatttcagcagtgatggatctatatgcaatttcctaagtcatcataaatcagatctaaactcatgagaatggtcaagaatttgatataaaataagacacaggagcagatccataaaagttccatattttagtccctccacccccaattgaaccacgcttgaactctaattagaaaattcacttggaggaagaaagcatagtatatgacacatgttcccctccagtttcctctcatataaatgacaatattcatatatttgaccacctttctgcttatttctgtggtcatcagaatgtttatgagtgtccaggatggtcttaccttgatggcctgattatctttctcttttcttttgtaaaagccatctgaaatcattgtaagggcattgaactaggatctggggcagctctgttactattaatagagttagtaaagttctctgggtgttagctttctccttggtaagatggaaaggataatactctttctactgtcatctcaaggtttagcccaatagaatgagatacaggcaagattggataatgcggcctttggttcctgaatctctgttctgaattagcatgagtcatgtctgtgtttggactttgagttaccataatctgctgttttaatttcaccaagaactgcatccccctcaaatctcacagtgttacaccttctccaatctgttaaccacataaatgggtcctgcgatggcaaaatatttaataacaaaagttagtttatcatcatccatagttgatcagacgaatcatcactgtgaggctccataaggccaatgctgggagaagggacatagcagccatctttccactatttccactgggaacaccaatcttccactcatttttgtcatggttcactggtggggatccctaatttcagtgaccttttccttgcttagagcatagtcctgtaacgcagacctggttaatcatggtgtctcttctgtttgtccgtggaacatagtccacgctgtagcagaatgaccaagctggacccacaagggttttctcatgcactttgaaagccaaaagctatgaggcaagattcccccatctcctcggaaatgagctatgaagacataagcctggtgacactggactgcaggaagaaagccatgctctccactgtgtaaaggaaggagagattgagccccacacatgggaggagtggaattgaaaacgctgattaatgactttggaaactgtcaggtgatttgtagaagaaagaacttactccacttcctactgagatcttatttcctgattaaattccttaagaggcaaactttctggagctaagaaagtgattgggaaaggaaagtggttctttatcttcctccttcctctcatgttttattttctgaaagggaagagtcactatttcatagccaaggataagaagggatcttgctgctactttaataggcattccaactggagtcctgagcctacttttccttcttattttgcatctttattcttattggatcgcctctcatttggctatcagaatatttctctccaccccactccctggtcaacatgatcttcgagtcagaagacttgcccattacttttgagcaacctttggatggtatgtggtgcatctgcagtggctctcaaaccgagggtgcatctgaaccccctggagagccagtgaaaacacagattgctgggcctgaccaccagcggccctgatccaataggtctggatggggtggaaagtctgcatttctaagtcctgaggttgtactgaggctactgctctgtggagcgcactttgagaactactgctgagatgaatgctagattagattaaatgtgagactcaagtcttggcctttggacaatccccaaagcctctgtgggcttcactttacctatttataaaatggatgatttgacctaggtgatcttaaaattttctttaagatgcctccaagtcaatgaactgatcatgaagttctatttggaaggactgcactgtcatgtcagcttttctttttccctttgagacaattatagctaaaaaagacaatatctaatttctgcagaaattgtggaagtggtcagagatcagcaatagaatagtgtaaatattatatgctattaattctaaggtcctgacataatactctgccattaagcttttcatctggaggttgtatattgttttgtaattatttgctaattaatcaggcactagttctagaatttaggaaacaccagctcagtagcttctcaaccatgatgaagagtagacagtattagaaaaacacagtagtgggagagtggaagattgggggaaggaaaagagagtccctaagcacaaagtgtgcttctctacctctcctccttctccattctgtgcttccctggcagatcttctgggcgaggagccaagagaaggtttgaaagtttgtctgcagctagataaacatctttagtggagagatggattttggcgtcacttaggaggtcccacctaattttgaaaagagagggagaaaaaggaatatctgaagacatcttctggagtggaaaggaccaaaaaatcattgagtctggctttcctctatcaccccaagttcctgcacaaaccacctgcatcccaacagcaatataaaatgactattttatgagtgagaacaggaaactgtggctataacaaggcttctttccccttttcttttgaggaggaataaatgatggatgtaaagacaaatatgaaacagtaatttagaaaataatttcttttcatgtaagagccactttttgacaacttggtggtatttaagaatactgatcaatgaggagtatcatagaatactgatgagttgattagatacgtaagtattgggcatctaacataccctagcagtatgtgaggcacaaattaaccaaacaaaattatttctatgttttaggagataacagttgagataggaagaggacaagtaaacagataattttatcagttccaacaggagtgaacacaggctaccacaagagagccttgcatgtgtgaatatcagcaaaaactccctgtggaaagtagtggcctcgagcatgagtagaggttgggtcagataggaaaaaggtgttcttttcagacttagcatcagacacaaaggctcaaagaggtgagttcatgaaactttgattgttgagtatgactggtggctagaattgaagctgcaagggaaagcatgggtacctattgactttattttgatccactagttcagtactagtcccagttcccaaagagtttggtttttattggtgagatgggggtggttgatcatggaattaactgatgtctatctgtagctaagtaactgggtgggttcagagcccttcctctcatggactgcttaacttctctcctctacactgttgctgtccttttatgatgcttttccttgcttcctaagcatggtttctccattgcatccatcctcaaccccttctgttcctggctttactttgaggcttgctctaggtataaattcattttccaaatagatacattatatatgactaatgtctatagggaaatatgacattttaagggaggagagagcaggatttgctgcaggttggagaactgtttttctaatcgtctgcctttctaatgtgctcccagatggtgctgatgctgctgatgcctggctacattttggagaacctggagccttctttcaaatgatggttgatgaaattatattaaacccaaaatttaggttctccaatgctctcctttctttttctctttttgagacagagtcttgctctgtcacccaggctagagtgcagaggcatgatctcagctcactgcaacctccacctcccaggttcaattgattcccctggctcagcctcccaagtagtggggattacaggtgcacaccaacatgcctggctaatttttgtatttttagtggagacagggtttcaccatgttggccaggctggtctcgaactcccaacctcaagtgatcctctcgcctcggcctcccaaagtgctgggattacagatgtgagccattgtgcctggccccatgctctcctttctaaaggggaagaacctttttgtagcagaggaatcattcttgaaggtcccaagatcctttctgctagacttcctattcttatagttgtttctaaacttaattctttctggaaaacagaataactgcaagaaaaaatctacatcctgaaagggttgaacccatcttgaaaatggcaaaatctccatcctggtgatcactggcaccatcactcccagtacagccatcactctatgggatcctgggcactgcttagcactaggaaggcgaatggctttaaattatgattcctgtcctcaagagataagtcacattgttgaaaacctgacatcaacgtacaaagattcataatcataaaaggtaactcttggtaagtcattataatcttattaattgcttctaatggtaagtcacatcaatgctgtattttttcaggtttcagaatttagcaggcaattgaatatgtcactgtttgggtattactaatgggagtagtgaagtttcctttttacctgtggttagcattttgcttttggctccagaaatgtcatagaaacaacctgacttgggcatatttctagagactatcaagttacatataaagtttagtatgttatttagactaatattttataaatcatgttctggaattaagctgagtaaggccaggaagaaagagggttgaggatggatgtaatgtaggaaccatgcctaggaagcgaggaaaagcatcataaaaggacagcaacaatgtagaggagagaagttaagcagtcagtgagaggaaggcctctgaacccactcaggtacttagctgtagatggacatcagttaattcgatgacccaccaccccatctcaccaataaaaaccaaactctttgggaactgggaccagtactgaactagtgggtcaaaataaagtaaaaaagaagcccacttcaagaaatactcctctaaataacttcagagaaaaggaaattttgagaaacaagcaatcacacagacacaccatgtgctgttgtcttttcagcaccagctctgtgttatggtacagttagggagaggatgaggagggctcttctctgagcacatttccaacagtcttttcatggtatgcagcagttgtttacaacaacgtttctcactttaatgtgcacacaaatcatgcaggatcttttgaaattcacattcagactcagtgggactagatggggcatgagccttgcagaggtgatgggctcacaggcatgccaatggcctgtggtccttggattgcactcttaagtagcaatggtttagaatatggtgaaaatatgttagaaggggcattgtgaatgtatgggggttcatctgttcaagaaacaacaatgaaaaaaaatggtgattaaatgcaaccacacctaaataaggtagccaggaggtagaaccagcttctccatgaacaggccacataccatctcccggggctgcctccagtgtccagcctggctgtgctcaggccctcagggcttgctggactctcctggcagtgtggggtcaggactcaagtaggttggatgctgatagcagagagtgtgattctccggcctgatgacccagaatcactcccaggactggaatcccagctctcccaggaggaaggagtcgtccctggtctcccgcatcccccaaatgctgattctgtgtctgcatgtggaggggtaacaaacaaacaacaaaggaccatctcaattaacctgccacacagagcagaatcccataaaaagttccaactctctttttggatgaagcttcttttttttttttttttttttttgagatggagtcttgctctgtcacccaggctggagtgcagtggtgagatctcggctcactgcaacctccgcctccttggttcaagcgattctcttgcctcagcgtcccaagtagctgggactacaggtgcatgccaccacacctggctaatttttttaattttagtagagacggggtttcatcatgttggctaggctgaactgcggacctcaggtgatctgcccgtcttggcctcccaaagcgctgggattacaggcgtgagccaccatgcccagcctggatgccacttcttatgatgcttagaatctggtcccctttcagaaaactgaagccttgaagtacctaaagttgctacattgttctctctctcaaagaggaaagcaaagggaaggtctaggccagcactttccaaaattcaatgtgcgtaggaaccacctgcggagttgttaatactcagattgagatttggtagttctgcgtggggtggggcccaagagtctgccaggtgctcctagctggtgctgatgctgctggtgcctggctacattgtgagtagcaagggcaagcaaactaagtgaccctctttggtgatctgcagagtcgaggatgatgcatctttcaggcctgagtcagactgtctgaactccaggggcccaggagctgcacagctgtgtaagattagaaatctcagcgctgagcaggatggggctggggccagttaatggcatcatttcattgtagtaactacagcaggccagagccaattgctgtttagtcagctttcccgtgtttgttgattttggtattactgatttattaaaggaagaggaactgtgttggatatcagaaaagtgttagaaagaggaaagtagagtaaatccaaacctctctctctacactctccaaacctgtcccccacacccaccccacccccttgttgccaagttgtaagatcttgggctgacttccaagttcccaaaattcaagtgtggaaaaagccaactaatctcctggaaaaatctcctgatgtgtatttttatttaacaatctgggctgattttaaacttagcccacagtaaactgtgctcaaccggcattatcattatggacacttgctgctgtattttccaaggatctcccctcccccgctggtattgctaccagatacagaatggaatttgtcaggacaagccatgtattactactaaaccattaattcagttagtgcattaggagtgggaagactgattctttgcattatattttggctgtcaggcctgatttgagtttatttctcattgagtattccatatcaaaggctgggataatagaattacaggacattaggactttcaatctggaagagaccctggagatcatttagtgctgcctgctcactttacagatgaggaaactatatttttcagtcttaagagcttgagcaagtactcggcttttgatatgcacatgtagttgccattcccatgtatgggagttgtgtgcgtgcttgaagggagtcaataatgaactttcctatttagttttccttgatcttggctttagcttcatcaaagtctgtcatacacaccctctggacagcatacattttgcaataatatgttgtcttggttcctgataatagtggaaaagaaatgtgatgtttttacttaaaagacactttatacaatttaatagcaactgcatctctggcatctataacagatgttatccagtgcaggcaactttttctaagtaatctagctgaattttagctgctgaaattttctgtatcatttggtgatcatatttcatttcagacttttgaacacgacagattgtccacctggatctcattttgccacattttattgatggcctgactcagatctttcaagttctcactaactgaccttgaaggagtagcttgttttttaaattttatgacacagagatgtaaactgcctgcaaattatgcaactcagtggtgatgaacaaagagaactttttattactatttattacctacagttaaggaattagcaagagctgttactttgcacccattcctgggacaaaatcccgaattaactttatatcaagcacatgtgtaacaagtgagaactacattttttgtttgcaaatctaagctcattgtagtgctattgcacttatgccttcttgtggctgccctgattccataaataatgacaggcttctctctcctggccttgttattctgagtcggatggcccattgcctgaggatctgaatgacattggatggaaactaaagagagaagacgaataaaaaatactacccatcaccctagtctggccatgagaaaaacatctaacaaattcaaactgaaggacatttattctacgaaattcttggccagtgctcctcaaggctgtccagattatgaaaaacaagaggagtgtcaaatggccagggtctcccagaggctcaggatataagatgactaaatgtgatgggggaccctgcgtgggatcctaggacagagtgaagacacttgaggcagtcttcatgaagtgtggactttagttaataatgatgtgtccatattagttcattgattgagtcacttgtgccacactaacataagctgtgaacaatagacgaaactgggtgcagggtataggtgaattctgtgctatgtttgcaacttttctataaatctaaaattattctaaattcaaacgtttactaaaaataatgcttatgcccactcagcctctgctgacaccaagcaagcatctgtgataggtcaagtttcagctccattatttcattaaatcttcagaacaactttatgaggtatttattattattcccattttatcactttgaaaacagagaaactgaagttcagggagaataatcttttctacgttgattgagttcccttggcttaaaaatggcagagttatgattttaaccctcatttatctgactctaaagcacacacttatttcagttccccatttggttctcagaatcctgttctcaagagatggggcagaggatggggaaatgggatggaaatggtgggaacggcctgtgtgtagttcagcaggactgtgtctggttttctgagccattgaagtttcccaaggaggatcacgcagcctctattttccctaaaggctaaggtccaggctagctttaggtgagttttcccatttccttggatttcattgaacaaacattaaaaaagaaattccccctacagtggccatgggtgcagtgtctgccatgcagaggagaagccgctggttgtagcagcaacactccagcttacctggagcaaagtaagtatggtcatgctgcatccttttccagaatccctaccactgtctgtgcatctgggtcactggcgaacctaaggacgtccagagccctagtttcttaagattctgactcagtagatgagaggagagcccagaaatctgcattcaaaattatttattgatgatttggccatgaatctgtattctaattctgaatctcagagaatcaactcttgttctcacctgaagaaaatgtaaaaccaccctcaacatggttgtctcttgagtaggtagcattaatagactgtctaggccaggagtccacaaactatacctctggttaaatggcccacagccccaccagcctgttttgtaaataaaatttgattgaacagagacatgctcttcgtttatttgttgtctatggttgctttttgctactatggcacagttgagactgtatggccctgaaagtttaaaacaataatctgaccctttacagaaaaaagttttccaacccatggtgtaaaagacagaaagggtctggaataacaattagtcgcagttaaagggaaagggagtctagttgctctcaagcttcagtgtacccaataatctcctgtgatacttatttaaaaatgccatcccttgagattctgatttagtagcctgggctgaggctaagaaatatgcatttttagcaaggttttgagacacatggtcctactcaccaagaatacggaccctgacaatagcttgacctgggtccataatcctctctagaggtctgtgtatgtttagttattactgtgtattatatttggacaaagatttaaaaaataaaactaaatatcacttttgtgaactaaatcatgccccccccaacaaattcatatattggagcactaacccccatatgactgcattcacagagagagtctttaaagaggtaattaaagttaaatgaagtcataagtgtagggctctaatctgattggactggtgttcttataagtagagaaagagacactagagatctctctttcttctctgcaggtgcataaaggaaaggccatgtgaggacacagcaagaaggcggccctctgcaacctgaccagcaagatctcaccagaaaccacccctgcttgcactgtgatcttggaattctagcctctagaactgtgaaacaataaactgttgtttaagccacttggcctgtggtattttgttacagcagcctgaactgactaatacaatcactaaattatcaaaaagtggaattaaaagtgttatatctgtttcactcaagatatgagtaggaaacagagaagagttagacaaaaaaaaaacaaaaaacagataaacagaaatttagtaaatatttgctgagtaatgaatttagacattttgctttttgatatgctttcaagaacttcaatgaggtataactgacattcaataaaccacaattattaaaatgtacaatttgatgtgctttgccatatgaaaccatcatcaaaaatcaagatcataaacacaactatcaccttccaaatctccttggatacctataattcctccgtctgccccttcctaatctgccccctgccatcctacaagaggaaacctctgatctgttttctggcactatagatctgtaggttaatgataattttctagaattttatataaatagaatcatatgggatgtaatctttttttgatttttttccactcaccatcattattctgagattcatccatgttgttgcttatatcagtgttttattccttttgattactgagtgatattctgttgtgtatactgtcattcgtttattcatttatatgttgatggacttttggcttgtttccagttttaggctattaccaaataaagtgcaaatctttctatggatagtttcatttttattggatcaactaggaggtgtatatttaactgttaaactgccaatttttttccaaagtggctgtaccatttcacctcctgccagcagtgcatgagagtcctagttcctccaaatcctagccaacacctgacggtcattttaatctgagccattgaaacaggagtgtagtggtatatcattgtggttttaatctgcatttccctagtgactaacaatgttgattatcttttcatgtgcttatttatcattcatatatcttctctggtgaagtgtctgttttgcctattaaaatattttttaaagttattgagttttgggggctctgtattcagaatgtaagtcctttattagacttatgctttgcaaatatacctttccaggctgtaacttgccttttcattcttttatgaatgaaacaatgttggtccaaaaacaaaggtttctaatttgtggaaatacagtttaccaatttgttcttaatggaccatgactttgctgtcatagcaaagaaggttttgcctaactcaaggccacaaagattttgtcctgtttccttctacaagttttatagtcttagattttacatttcattctacaatccatttgagttaatttttgtatatggtacaaggtgtggattgaagttcattttttgtatatgaatatctaattgttccagcattagttgttgaaaagactaccctttcccccatggaattacttatgcacctttgtagaaaatcagttatttacataaatgtgggtctatttctgtattctctattttttcccattgatttatttgtctgtgttttgtaccaatcacacctgtcttgattacagtagctttataataagtcttaagattagtgagttttggtctttcaactattttcttccttccaaaaaaagttattttggctattctaggtcccttgcacttccatattaattttagaatcagtttgtcaatttccaaaataaaaatgctgggattttgatgtcttagtgacaataatgagacttcttccaagggtaagtgactcaatccagttaccatttcatgacaatggaaggtatgcaaacatatacacaaacaaaatcagcagaacatgatcacactaattttgctatcattaccaggaaacaatgaaacaaaattaatttcccatcttaatactctagctttatttcagctgtctgcagacatgtatgcactagcttccctttggacactctttttttaaaaaaatgaggtgacatggacataatttaaaagtaaccattttaatgtgaacaatttagtggcattttgtacattcataatgttgtgcaacaaccacccttactaattttaaaacattttcctcaccctaaaaggaaaacctgtacccattaagaaattgctccctatttctcccacctctggcaccaccaattttatgttctgtatcctggatttacctattctggccacttcacataaatataactacacaatacataacctgttgtgtctggctttttttacttagcataatattttcaagactcatccacattgtatcaggcatcagtactttgactggataatattccattgtatgtgtatagcacaagtggtttatccattcatatactgatgaacatttgggctgtttccactttttggctattgttaacagtgctgttataaatgtacatgtgcatgtatttgtttgagtacttgttttcatttctagaagtagaattgatgaatcatatggtaattctacatttaactctttgagaaactgcccaagtcactgtcagaatggctgaaccattttacatgctcaccagcaatgcacaaggcttccattttctccacatccatgctgaaattcattcttttcttttcttttttttgaattatagccattctggtgagtgtgaagcagtaactcatcgtagttttgatttctcttgtgacttatgctgttgaacatcttctcatgtgcctattgcccatttgtgtatctactttgtctgtcaatcctttgtccattttaaaattggattgtttgtattttggttatcaaaatgtaaaagtttttatacagtctaaatactagacccttaccagatatataatttgaagatatttctcccattctgtaggctatattttcactttcttattaatttcctttgacccaaaaaagttttaaattttgatatagtttaattaatttatttattttacttttgttgctttggctttcagcattttatctaagaatctattctcaaatcaaagtcatggaaatttacccctatgtttttctctgtctatttagatttttgatctatttttgagtgaatttttccctggtgtgaggtaaggatccaactttacttttttgtaggtggctgtccagttgtttcatcattatttgttgaagaaactattatttccccacttattagtcatggaactcttgtcaaaaatgaattggccatagacatatggattactttggactctctattttattccattggtctatatgtctatcctcatgctagtgtcattgttctgatttctgttgttttgcaataactttagacattaggaagtgtgagtcttccaactttgttctcctttactaagattgttttcactatttaggacactttacaattccgtacatatttaaaggtaagctttttcatttctctagtaaagaccatttaaattttgatatcaatttttgtgttggatatatagatcaatttatgaagtttaaaaatatctatttaaaaaataagtttctaattcatgaacatggggtactttccatttctttttattattactattatattttaagtcctagggtacatgtgcacaacgtgcacatctgttacatatgtatacatgtgtcatgctgctgtgctgcacccactgactcgtcatttacattaggtattcctgctaatgctatccctcccccatatcccccaccccatgacaggtcctggtgtgtaatgttccccaccctgtgtccaagtgttctcattgttcaattctcatctatgagtgagaacatgcggtgtttggttttctgtccttgcaatagtttgctcagaatgatggtttccagcttcatccatgtccctacaaaggacatgaactcatccttttttatggctgcatagtattccatggtgtacatgtgccacattttcttaaaccagtttatcattgatagacatttgggttggctacaagtctttgctattgtgaatagtgctgcaataaacatacatgtgcatgtatatttatagtagcatgatttataatcctttgggtacatacccagtaatgggatctctgggtcaaatggtatttctagttctagatccttgaggaatcactactctgttttccacaatggttgaactagtttacactccccgaacagtgtaaaagtgttcctaattctccacatcctctccagcacctgttgtttcctgactttttaatgattgccattctaactggtgtgagatgttatctcattgtggttttgatttgcatttctctgatgaccagtgatgatgagcattttttcatgtgtctgttggctgcataaatgtcttcttttgagaagtgtctgttcatatcctttgcccactttttgatggggttgtttgattttttcttgtcaatttgtttaagttctttgtatattctggataaactgaaactggatcccttccttacaccttacacaaaaattaattcaagatggattaaagacttaaatgttagacctaaaaccataaaatccctagaagaaaacctaggcaataccattcaggacataggcatgggcaaggacttcatgactaaaacaccaaaagcaatggcaacaaaagccaaaatagacaaatgggatctaatttaactaaagagcttctgcacagcaaaagaaactaccatcagagtgaacaggcaacctacagaatgggagaaaatttttgcaatccatttctttagatctctaatttctagttttggggagagttttataaatgttcggtaaaattcatctgtaaaggcatctgatccttggcttttcattgttggaaatttttgttgttgttatttgtttattttaaattactgagtcaatctctttacttatcaatctgttcagattttttgtttttttttgaatcagttttggtaatttgtgtttctaagaatttgtccatttcagactggttatctaatttgttgatgtataactgttctcagtattatcttacagtttatttctgttagattagtggcaatgtcccccttttcacttctgattttatttgttctttttttcttttttgccagtctagccaaagttttgtcaatgtcgtcgatgttttaaaaaaatcaacttggtttcgttaattctttctattgttttcctattccctatttcatttactgcaactctactctgattatttccttctttctagtatctttcagtttaattttctcttcttgttctagtttcttaaggtgtaagtttaggtactgatttagatctttcttcttttttaatgtgggcatttactgcaataaatttccctcttaaatactgtgtgggatatattctattagttttgttatattttgttttgattcatcttcaagtatttttatggcccttgttatatcttctttgactcactggttgtttaagagtgtattgtttagtatccacatgtttgcgaatttcccagttttccttctgctgttgattttaacttcattccattatggtcaaaaaagacattttgtaggccaggtgtggtggctcatgcctgtaatcccagtactttgggaggctgaggcaggcggatcacgaggtcagggtttcgagaccaacctgtccaacatggtgaaaccctgtctctactaaagatacaaaaaaaaaaaaattagtctggtgtggtggcttgaacctgtaatctcagctactcaggaggctgaggcaggagaatcgcttgaacctggaaggcggaggttgccgtgagccaagatcttgccattgcactacagcctgcgtgacagggcaagacttcatctcaaaagaaaaaaaaaagatattttgtataatgtcaactcttttaacattattgagacttgttttgtgacctaacctataatttgtcctaaagaataccatgtacaaatatgaataatacatattttgttgttagaatatgtattgggtggagtattctgtgtgttaggtctagttgttcaagtcttctattttcttattcgttttctgtttatattttatccatgatttaaagtggggtattgaagtctctattactgcagaactatctatttctccttcaattttgtcagtgtttgcttcatatacttgaggtgttctgtgaaagggctgtatatacaacatgatctccaaatgcagattgagccaagaaatgaaaaaatgagtcagacaaatccagtttgtcagtaaatggtgatttattagaggacttacagacagaaatgtggtcttgggtggctgcaagccaggaagaattcggcagtgcaaccctctaggcccagggcttatatatcttgggtggggggtaagtacatatccctggaagaaatgtgtaggtgacttaaagaatactactggcatcacaacctatgatgcatccaacatcaagggctgttttggaggaaaggtgaaacttacaataaataggtatttctacatagggagtaatatatcaatgagacatcttggaggaattcccagattcaaagttagtcaggagtcacatggcagattagcatctaaaatagaatcactcttgtccccatatggaggctctgttgttttgtgcatacatgtttataattgtaacttcttgatgaattgactcttttactgctatataatgtccttttatcttctaacaatttttcacttagtgtcaaatttgttttttagtatagccactctagctcccttttttctgcttttttaagaaaaaaattatttcaatagtttttgggaaacaggtggttttcgttacaagattaagttctttagtggttatttctgatattttggtgcacctgtcacacaagcagtgtacactgtacccaatatgcagtcttttttcccttacacccatctgaacccttcccctcaagtccttaaagtccattatatcattcttatgcctttgcatcttcatagcttagctcccacatataagtgagaacctaagatacttggtttaccatccatgagttacttcacatagaataatggtctccaactctgtccaggtttccacgaatgccattaaatttgttcctttttatggctgagtagtatttcatgatgtatatataccatattttctttatccactcattggttgtggacatttaggatggttccatatttttgcagttgtgtattttgctgctataaacatgtgtgtgcaggtgtctttttcatataacaacttcttttcctttgggtaggtttacaaaaactatctttttcccgttcttttacttatatatgcttatttatatatattatatatacacttttaatatatacttattactatatattaatataatataataataatacaatataatatatgtatatatgtaggtatataataatatacctacatatatacatatattatatatactatctgtatattatatgtataatatatgtatatataatatatgtatatactatacatgtatatattatattatacatgtatatattataagtatatactatacatgcatgtattatatgtatatactatacatgcatgtattatatgtatatattatacatgcatgtattatatgtatatattatacatgcatgtattatatgtatatattatacatgcatgtattatatgtatatattatacatgtatgtattatatgtatagattatacatgtatatattatatatgtatatattacacatgtacatatatgtatatattaaacacgtttatattatttattatacatgtaggtatatatgacatatgcatatatcatataggtatatatgacatatgcatatatcatataggtatatatgatatatgcgcatatatcatataggtatatatgatatatgcgcatatatcatacaggtatatgcgcatatatcatataggtataggtataggtagatatatgatatatgcacacatatcatataggtatatatgatatatgcgcatatatcatataggtatatatgatatatgataggtatatatgatatatgataggtatatatgatatatatcatatcggtatatatgatatatatcatatcggtatatataggtatatatcataggtatatataggtatatatcacataggtatatataggtatatatcatataggtatatataatatatgcatttatattatataggtatatatattacataggtatatgtaatatgtgcatatatattatataggtatatatattatacaggcatatataatacgtatatatattatatgggcatatatatgtgtatatattatataggtatatataatatatgtgtatatattatgtgggtatatataatatatgtgtatatattatgtgggtatatataatatatgtgtacatattatgtgggtatatataatatatgtgtatatattatgtaggtatatataatatatgtgtatatattatgtaggtatatataatatatgtgtatatattatgtaggtatatataatatatgtgtatatattatgtaggtatatataatatatgtgtatatattatgtaggtatatataatatatgtgtatatattatgtaggtatatataatatatgtgtatatattatgtaggtatatataatatatgtgtatatattatgtaggtatatataatatatgtgtatatattatatatgtaataggaagcaggaatgaatgcacagaagaccttagagtttaaggcattatttgtgtaatgagaaatattatatatacgtatattaatatagacgtatatataatatatacatatattaatatagacgtatatataatatatacatatatacatatatagtatatactatgtatacatatatactatacatacgtatattatatacatgtgtattatatacatgtgtattatatatatgtgtatacatatatactatatatacatacattatatacatacattatatatgtgtattatatatgtatatattatgtatgtatatattatatatacgtatatattaatatacatatatatgtgtctcattataccaataatgccttaaactctaaggtcttctgtgcattcattcctgcttcctattacatatatattatatagatacatatataatatatacatatatactacataatatatgcatatataatatatacatatgttgtatatgtatatataatatatacatatgttgtatatgtatatataatatatacatatgttgtatatgtatatataatatatacatatgttgtatatgtattatatgtatatattacatattatatatacttatgtatgtataatatatatataatatatatatatcttaggcaacttttcattgctcatttttattaaaccctgaaaactttcactttactccatttctaagtttgatattctggtagaattaaagtaagagttttctttctttcatctcctttttatctctctcatattgatttcttttaatggaaaatttttttatttattattttatcgttccgatagactttgccgagcatctctcctcaaatctgtatccagattatttcctcaattgtcttgagttggctgtgctatatcattagtttatgtctttttatcttcccatgtaaatactttactaattctgggaccagaatagatatctttgtatgtgttttagttagctattgctgtataattccagtatccataggcgcactttgttaaagagtggctcatccgtctatggtcacatgaaaggaagtacaattcagggttcttctaaccatccctgtcccacagatcttccaaggagacaatgtggtctcatcatgccttcacaatcattggtgtaatgatttccatatttcacagaaaacccaatgcaaggcaaaagagcttggttgagtcaccccaagtgacaaagtcatacttaagcttctggtttcagtcagtcatctttgctgagaggttggagaacacatactagttaagacaaataaatagcaatttaaactttggacatgctttcttctcttagctatgggagggacacatgtttggagaaaaatcaaagcatgtcaggagggatgtaaaaacatttttatttctaatcaacaagtttataatgctttaaatgcttttggtttgtaacaagttaaaaatgaatgtctatttgttttttttaaaatctgtcttctttgcagtatgatttccttggtgttagaagaaaaaaaactgtgccttatgaaaatatagattaaaaatgtctaaagatgtagttattagacatttttcttcaaatgcaacaatatgtagttaatcaaaagataattacgtttcctgaaaaattacttttcctattaattcagtgtttttaaaaagactttgtatagtatggcctaattaaaacaatatacacagtcttgctagatgctttgccagagacatttcattgaagtggtgacatttctattcagctatcattagcaggactgaggggcatctagagtcatttcacttttccaattctagtgaagtctgaaactaatttagggttaaacgaaaaaagcttcaaaaaaggccaagaacaagtataagcagccatgggcacagtggagccaggttagaagggagtcctaaatttcaggacaataattaggaacaaccatttgtcttctagagatgttttgggaaaccaaggtcctatagcagaaaaatttcttaggattcagataaaatcctgagtcatctaggaacagaatactcacaccagcttttcttataaaaatgaacactccttccctattgcactcccacagcctcatgcccatatcaacagttgtcccaagtaggcctgtgtcagctcagttcttgggttctggttgtagggctccctgagtcaaattataactcagtgggctttactgattattgactctccacaatttgtggcctcaggtgaggcctaacttgaactagagtcaccaccagcatattttttaaacagtccaagaagaggctaaaagctacagtatgaggtgacaaatggaggtcttctttaatgaccttctagagtttcatttaactaggggatttctcagtcagtggcatgagatcagagagatttttgaagacaaagtgtaattaatagagtgggccatggacataagagagaaagcaacttcccaattttgtatactgtgcactatttctgcatatttatgatgcttaagttagagtgctgagtgtcaaattcatatgtaaaaatttaaaccacatgacctgtgaattggcaagtttttgaaagaattctgtttaatgtatttgaatctcatatatacttcagtttgaaactcctgttgagtgtttattagttctgttcagtaaagtgttacatgaagataaatattaattttccctgcaaaaaagtagcaaaatataaactgtagatcaaatactggccaatttgtcaaaaacatttttgtgtaaaagaacattaaagcttaatagatgaattgaacaatataattggttgaatagtttccttcaaaataacataaacacatatgttggtaggaatcacatgaataaccaagtatcacataaaagcctttataagatgggcaaggttatgctataaatagtttaagatgagttttcctttgacgactctgttttgttatctggtattaaatagtttttattctgtaactttgggtctgctccctattaccaaatatttattgtgttttcacttaaagtaaacttgactttaaaaagaaatcataagaaaaaaattttgtttttgttggtttctttttgtaaatgaatatttacccaaatcatagattctctctttgaactacagaggcttcaaatgggagaaatcctccaagccatggcatatttttatggtgtaactactcactcaaatgtctttccaaagtatgtattataataatcattcacaaataaatgaataaataaacacaaatgcatgctcatgtaacatgtgtgtatatattttgtccaagtgtgtgggacatctttttaaaaagattcatggttgactaagaatgcccacttttttagagcaactaaagttgtaggcattttctgagatataatttgattgtctgacattcatgattgcttctttgatgtattaaatttggttatttatctgaaaaatttaaaaagacaatagaatgctattcatgagatgctctaattatgacacatttactgaaatgtttattaagcttattaaactaaaataattactgattactgtaatacagcccacactaaaattttatgtttcctttaactcagcaaataatttctagaatattatcccatgaatacttgtagaactttgatggtaacactgtttatctcatccctaattatggaagcaaagggtgaaaatataaaggtccaaaaatagagaattagttagatattatgtgataaaagataatattcacaatgccatattaagtaaaaagttggtcgtatgtgcatcaaataaccaaaagtaggttatttgcaattcttggaattgatgtattcaacgttcatctaaatcccaaatgtaacgaattgcacctgcatgtctgtgtggatatatatgtatacatatatatgggtaattatgtgcattatatacttatatatttaaaagtagtatttattgttaatattgtaaatattccctaacaaaaatgcaaatattgctaataatgtgaaaatccatgaatacttctggtagcacacagaaaacaagaaaatgaatggttggcaccactggaaaatgatgttttgttacccaaggacttgctgtcattatgttttctgagagaaaattaatttttgtcttgtacttacttattttgactaaatgcttccactgcttaaaactctctgtgttctgaagccatgtctatctctaacgttgacagaagcacagcatgcagatcttcattgcctttccatgcagtcaccctttgctttgaagacataaggcaaaaaatggagagaagcatttacctggggcctcaactacattagtcctaaggtggctgcttagggtcatgttctgattaaggtgccctatatttattaacttgggctttttttggtgtgatatttggggcgtatactttaaagtatacgcatatggcagaagtctcttttgcccaggcagaagggtatgctgtttatatgtaatacttaagcccattggctagagacattgttctttaatatttttccatatctttttatgtcttctttcatccttttattttcaatggatttttatctctgaatataaagtgtgtctcttatagacagcatatagatggatcattttttaaagtactgtgtgacaaaatctaacttttgattgtttactccattcacatttagttctattattgacatagtaggatttttatgtgccattttagtttttgttttctatgtctcatgcaatttttattcctttattcttccttcactgcttgtttttgcattaagtggatgttttctaatgtagcattttagtttatctaatatttatttcattaaagttttgaggttttttttaaaatagttcctctagggtttaccacatgtatcttaatttatcagaatcaccttcagattttcactttcttaattgcagttatatatggaaacattaaatggaataatgattccattagagctttatttcattttccccttttttggtattatttttatatatatcattacctctattgatattacaaaccaacaatgcattgttatagttattgatttaccatctatcctaacacagttttgctccctgtcacctctgttgtgctagtatcggcaaatatattatccatatgttgcatatttatatgtgataagcccaaaattacattgcacatatacatattattttatacaattgattttaaataacatacaagaaatgataaaatgtgcttttatgctgttttataaaattacaaaattatctttaccaacgttctttgtttgtgtgtgtgtgtgaattcaaattagtgtctagggttacttactttttgtctgaaggactttcttcagtatgtcttgtaagattaatctggtagcaacaaatgaccagtttttatttattttagaaagtcttacttcactctcattttcgaaagataatgaaatgtagctttgccggatgtagaattattggttgaattttttgttttcggcactttgactgtttcatcccactgctttctgtctttcactgtttctgttgagaagtcagctgttaatattattggggttccatcgtaagtgatgagcttttctccttctgcattcagggttttcttcttgcctttgactttcagcatttttactatgatgtatctgtttgttgatctcttgtgtttgtcctagttgaatattctagatgtgtgagttagtgtttctcaataaatttgagaagctttctgacagtgttttcttgaatttttttcttcctttttttctctctacaccttcaggtatgcctacatggtacaggtgacattgtcccatatttttctcagtctgccatcatttttctttattcctttttatctctgttcttcagcttgtataatctctataaatttatgctcaagttcaccaattttctcttttgtcagtttaaatctctgttgaatcacctagtgaattttaaaatttcagttattatatttttcaactccagaatttccatttcattctcttttataatttatttctatttattaacacaggttgaatatcccttatctgaaatgcttaagagcagaagtatttcagatttcagatttgggttgggtggattttggaatatttgcattatctgttgactgattcagcattcttaatcaaaaaattcaaaattgaaaatgccccagtgaagcattcctttgagcatcatgtcagtgttcaaaacactttggattttaaagcattttagatttcagattttcagattaggtatactcaacctgtattatctttgatgcaatgttatcattatactttatgccttttatcatgctttctcttagttatttgaacataattataatggctattttgaagtctttttctcttaaatctgatgttttgtcattctcacagacaaatttatgttttctgctttttctggtatatggctcatatttttctgtttcattgcatgcctcatcactttcttttggaagttggacaatttagatcatatgtattgcagcaactgtgggtagtagcccttccccaatgcttagcttgtattgttatttgcttctttatgttttagtgagtggctggattattttagcgatgtctgtttacctccaacagtggtaaacctctgaggtcgtttctcagggaggtgcagttttgagtatgtctgtagtcacttgggatgacactgatattagtagtctcttttcctgatcaactcagatattaaactccactaatgctaactgattactctattgtttgcaatgattcctgggggcataggttgctctacataccaatccaatcaagtatggctcctttgtaagaaaagtttctaatgtcctgtgtaatatttgttctaacccagaagggtttttctagatgtcttattccttgtttctctctggcaaaccagttggttaactgtcttgggtgtatttttattaaatacaagaaagttccccaaattgtctttcaccacaatatccactgttcttaagagtgactttaggtttaaatttctccatcctcttttgtaaataaagatagttcccttgggaagagagtaagagctatgtattttatagattatttatcttcccaggaaaattctgagccagtgctctggagctggcagtagtggaaatggaaatcttctctcctagtgatatccccactctaggagctgagcactgggtgaaggggatagcagactgaggaggtactcctggcttctctctcctagcatgaatctacagccttatgagccagataaagggcaatttgggcttctgagttctcagcatactgtacctgtggtagagcctcttttctttaagtggggcctgggcagataaggggaacctccacctcttgccattgcttgcctggaaattagcctcaacaacaagtagctgagaataggatgagaaatgctgaagtcctaatcattttgggaaataggaagctctgtgttcttggctgcagcattttggagaagggtctctgccttgttaaattgagaggggaggaaagagggcaaggtattggttcatataccacatggcctcacctttgttactgaatttttttttttgagacagattctcaatctgttgcccaggctggagtgcaatggcacagtggcatgatcttggctcactgcaacctctgcctcctggattcaagcgattttcctacctcagcctcctgagtagctgggactacaggcacgtgctaccatgcccagccaatctttttttttattttttagtagagatggggtttcattgtgttaggcaggatggtctcaatctcctaacctcacgatctgcgtgcctcagcctcccaaagtgctgggattacaggcatgagccaccatgcttagcctgctactgaatttttataggttttcttcaacagatgtttattcatttactatttgcctttagggttatttccaaaaggttgttttaaaatattttttattaatttccctggggagtaaatcagcagacctactcatgctgtcatgctaggcatcagttttcccttgccttcatttttgaaagatagtttagttttgctgaatataggatttttggttgacagatttttttcttctggttctttcagtacattgtcccacagcattttttcttcctcatttctcatgagaagtcattttttaagcccactcaggttccattgtacgtgactaaagacaagtttttttctctcctgttgttttcaagattttctctttgtctttgtcctgaaacattttgactgtaatatatctatgtttggatctctttgtgtttatcctacttgaagtttagatttggtggtgagcaattaaaaaaggttattaactcagtgaaaataatgacaacaaacaaaatagatgactacccaggagtttaacagaaagaaccaaagaaaaatattttaaaataaaaaataaaagcctagtaagactacattcagccctgggaatctgaaggctatgtacatgtgccagactgcactcacccaggagtgaaatgggacagttccctggttcccctcacaggactttgagacaggggtgttgcctgcttggtaaccccagagctcaaacccctaaggggaccatgcagacaggcaggtgtagaggctggtgtgagcacttttgggctctggccccatggcagcatttagcggtgggggtctgctactctggaagcccaagtgggcatgtgttacagtgtgctctttcagctttgctgtctgcagatggcttgtgttaatcaactcaatagaccctctgccttatctcaagggcagggggtcagtttgacagccttctacatcccaagtccttgcccagtgtaccagaagaatcggaccacacatgggcttgaaggatgagtgcaagattttattaaatggtggaggcggctctcagtgagatggatggggagccagaaatggggaatggagtggaaggtggtcttcccctagaatcaggctgcccagcagccagacacttctctgactgctcctggctgaactccccttggtgccagacatccttcctcttctctctttttctgctgtgttgtttcactgtagctggtctgctggtcctgatgttcagccacttgtttgtgtgcctgctgaggtctcaggtttatatgggggcaggatggagggggcatggcaggccaaaaggcaactttttgggtgcaaaaccagaaattcctgtctttatttggggctgcagattttcaggcttgagggtggggtctttgctggggatccaccctcttctacccaatgtttccctgtcttctgtctgtattaggagcaaccagattcagcactagaaagctgccattctctggctaaatgtggagtggacttgaaagcattccccgaactatacacagatttatcaacaaagggccgaggacttacaaacttaaagggcaactctgaccaataagtatctcaagtcttggttgtgtagattaatgtttttcaccatacattagacattttccatcattacttcctcaaacatactttctatcttatcttgctcctccctctccttctgatactcccattatgtgtctgttggtatgcttaatgattttcatagctctctgaagagttttgcatttttcatcattctctcattctgttattcagattgtaaatctctaatcatctgtcttcaagtttgctgattcccttttttgccagttgaaatgtactgttgagcacctctagtaaacttttcatatcagatattgtgtttctcaattccaggattcctatttgttttggaagtagtttctattctctactggtattctctatttgataaatcattgcatcaaaccgccattaatcctctaaaaatagcttctaaacaaacctttgatcttatttataatagctgctttaaaatttttgtttgccacatccaatatctggattctctgaagggcggcttttattactcacttattttttttctgtatactgatcacactgtcttgcgtctttagcatgtctcatttgttgttgtttttgttgttgaaaactggacattttagataatacattgtggcaactctggatcttaattaattagtgcctccttctatcagaggcatgttgatgttggtgggttttgttagtttatttgtatagtggtttgcctgaactaaatttgtaaattctacttcctccaaagggttgcctctgatgtcactgctcaatcttttcttctttgtttttattaattatttatttatttattttgagatattttcttttttttattatactttaagttctagggtacaggtgcacaaagtgcaggtgtgttacatatgtatacatgtgccatgttgctgtgctgcacccattaactcgtcatttacattaggtattcctcctaatgctatccccccccccccacccccactgcatgacaaaccccggtgtgtgatgttccccttcctgtgtccaagtgttctcattgttcaattcccagctgtgagtgagaacatgtggtgtttggttttttgtccttgcgatagtttgctgagaatgatggctttcagcttcacccatgtccctacaaaggacatgaactcatcgttttttatggctgcatagttttccatggtgtgcatgtgccacattttgtttgtttttattttttaagcttgcctcctggaagccaccatttgcccagcatagtttagtgttcattcaaatattggtcagaattagtgccctttaagtttgtacaactttggccctttgttgatgaatatgtgtatagtttcaagttcaccccacattttaacataggctagtagctttcaagtgctccatctggctcctcctgggtgagtgcagcctagcgcatatactcagctttcagaaccccagggctcaatacagtcttagcagtctttttatttcttttttaaatttttttttcctactctgtttctttctgttaaacttctggctggtcagctattttcttagaactctattgatgagtttttagacttttcttaattgctcaccgctaagatctctattattttccacaatgccttgaggcctgagtttctccagataatatcagcccttccgtcagatctgtagagcttccagtgttcccatcttgcccctccctctgggaagaatctctagcgctctactgtaccagaactggaggtggagatggtggtcttcttccagatttatacctttaccttataagtgggagctgggagtaagtatagtagcttgtggtattctcagcttgcccctctctgaggggagcctataacatacaagtagaaaccgtggacaggcagtaatcagggcctggtattcttggcctaaaaagccttagatagagcctccaccaaataagtggaagtgggtgggggaaatgaggcccagttcttgaccgcacctcccagaacagagaggaaaagaggcgccagcagcttgcccctcttggggtgaagccatagccttatgactgtgtcctgggagtaaaaggatctgccatcctctcggccacactgttctttccaaggttttatagattttattgaataaatgcttctcaatttgctgtatgcccttaggtccatttccaaagacttcaaatggttgtgttttataataatcgacacttgatcattgtttcactggggagagaagttgctgaattccttatagttgatccagaagtcctaattgcatccttgtttttttcctataataatgtgtctcaagttcattttgtacaattcctttccagtcttgcattcattttccaaaggagaacttgttcctttcaatgggaaatgatatttaaagatcacagcttgggtgacattatttctagttcttttcactataaagtaaaatgcttttttcactttacattttcaccactaggaaatgattttttaaaaaagataaaatacatcatgaggtcatactggaaaaccttattcccacaaacgccaacataacaacttgttttatcctacaaaacacacacagcaccattgttactacatataataagataatggaaaaacctatatacaaatgaaaaagagccttaaacgttgttttacagttcttcttgtccttaggacatgtccaagtagtaatgtacagtcaaataatgtatctcaaagtagctagaaatagttcctctgagtgtgtttacaccacaaactacatacatagttgctttttatttttatttttagaaattattttatgtatttgtttattcaaattatatacaaatatttacatgctttcaaaattaagcatgcaaaataagatgtattttaaaaagtttaatgtctatttctgtcttctctatcttagtctctctttctgccataagtcaacatttaaaatattttaattttacttttctaatacattttaaaaagaaaatttacagaagcttgtattcatatcactttcctttcctgaacagtgctagagtacaatacattttttcctacactttgcttgtttcttttttaacaatttaacttagaaaacattctgcagtaatatattaaaatatctctattttttgtttatttgctagtattttattcgggatttttgcttccatgttgatggaggatcttcaaaataactgacctgtgcgtttgtttgtatttagagtatggtgtctttggtccacagctagtggggtatgaactctagtttctgggatcctgcttcggccttgcagcttcacattgatctctttcatgtgttgaatattgtgtaatattccagtcaaagaagatcctgaagatgtttaaaaatcactgcttcagagtgactcagttgaatgaatatatttttccttgctaaaggaaaacattgtaatttaagaatttcttttgaaatttttattttcctctgccagttaattcagtgttattttattttaccagttgggatcaataaatctttgttacagtcatcaaccatcactatgataaattttgaatttcatgagctactcactcaatatttttaaaattatttcaaaattggacacttaagttcatctatgagctgggtataggaaacagttaagaatgtgtaggtatcagtgcaaactgtgtcttcctgtacctagaaaatcccctgaatctttctcccattccaaggacagaatttctttttcctactttgcactttttccttctctttaattccattaaaatgaagttgcaatctctagatggcagatatttcttaagcacaaaaactgcataaatttcaaataatttaattcatttttccattagtcaaatacactttaaaaaattaaagtgtatttgaaaaatttaaagtgtatttagattaatgcttttatctatataaaagtaaacatgaggctgggggcagtggctcacgcctgtaatcccagcactttgggaagctgaggcgggcggatcacgaggtcaggagatcgagaccatcctggctaacacagtgaaaccccgtctctactaaaatacaaaaaaattagccaggtgtggtggcgggtgcctgtagacccagctatagggaggctgaggcaggagaatggcatgaacctgggaggtggagcttgcagtgggccaagatcgcgccactgcagcccagcctgggcaacagagtgagactccgtcttaaaaaaaaaaaaaaaaaaaaaaaataaatatgaaatatctaactatgcacttgagaagtttctcatgctatggaaatttgttgccccagaatttaactaaaaacaactgagaaactcaatatattgacttttcaaaggaaaattttttaaaaattagatggatgtggctgagaccgaacctctagcagaagtgagaattgatatgggttgtttggttaggtttgtgtgagactgctaattattacaatgagagtccattaaaaagtgttctgacaaaaaaaaaaaaaaaaagtgtttctggcagccttagtttgttctacaacactaggcattttctttctttctttttttttttgaagtgtgtacttccatttaattctacttcctctggaaatgagttatccatcacttctctctgtttccttttcttttatgtgtaagacatctctgagtaatgtggagttcttgtaccctctaaagtgaagatgccttttgtcattggacctttcagctgcagagcaggttgtgtgaggggagaggtcattggctctgttacttatgttaaagacagaaaaattagggaacaaacagctgtagtcattttcccagtatatctccttgggttttcaagctttatctggtgtggagggaagggtgtttgcgaagcagtgtagagacgctacataagggtgaagctatcccaggatggaatcatagctgtgggtcactttttcacatcagaggctccactggtagatgttggcccttggtcttggactttcatggctcttaagaatttcatttatctttgaaagaccagatatcatgtttctttttgaatcacttttatttcttctcatcctagggttgtttcaatgtaaaataaacgagaaagactctttgctttgtatctgattgcagttgattttattgtgagatctttaaacccatctgccaatactgatcatctcctctgctggctgaagatgataaactctgaaacatcttcagagtctgcataaggacaggaaatgtgtgttactggccccaggaggtcaacttccccatcctctacattttttctaactctggctttagttttcaacaaaccttagctggtagccaagaaaaatacttttaaaaacgccccttcaaaactgaaagagacaagagtcataaatttaaaaataattataatgaagcaggaagcttggctttctatgcccatcttccccgtcctttctatgaaagactttgtgggaaggagtctgctcatttccttgatgctctgaacacatgaaacccctgtgctgctcttcccctccaccagagggatgttcctggacattgggcatgtggcatttttcaggggaggaaaaaaaatcctggttttgacttaagacctctcactcaaatctgagaggaaaatctgtacataagtcttggttccccaaaggagagaaaatgagaaagcacttcctatccattaaaatatccaaaacattgccgagggaaagttaagccagtccagatgctaagcatgttaagtctaaagaagctcagaaaccctgtatgctgccaaaaaacagttagggtcatacttcatctagaccatttccttgaggaagctcatggctttccagttggttccgtgagtaggtaacacacttacctgtagagatcaaaagctaaacgtaggcccagagagagtgatcttttctcatgtttctgcttcacacatgcatactctggaaatgatatgagtgagggtcgatgggctccagaggcctcctccagaaggaacaggattacagtccgaggaaacagctcaccatcctgcttcacagaggcttttcagagttctgcatgctgcccttgaagacagtgccatgaggagaaaaagctgctgaagctataaatcagtgcaaatcatgtttgctattttagtaaatgaaagttttaaaatataaacatatgtatgaataataacagaggcacttcttgagtccattagtataatatatgaattagatatttaaaagttggccagtatggttgagaaagtaccataatactttttttgtttttattatattttagttatgcaactgtactgcaagtcctatgatcatgcagcaagaaagaaaaggaactgaaacatgctgtagatgtgtgctatggtttggatattttttgtttgtccccaccaaagctcatgttgaaacttaatccccagtgtggtggcattgcgagctggggccaggtgagaggagtttcagtcatggatgtggtcactcatgaagacattaatgccctcactcaggggcgagtgaccaaagacaaagaatctggcttcatttgtttctctctcttgcttcctcccacagcgtgtgatctctttgcacatgctcacccccacttaaactttccgtcattagtgaaaacatcatgaggccattaccagatgcagctgcctaatcttggacttttcagccaccagaaccatgagccaaatatacctcttttctttatatattacccagcttcaggtattctgttgtagcaatacaaaatagactgagacagtgtgtgaatgtggaaaagtctgggaatgtgcaagtaggcagtaagatgctgtctaaccaaagcctgaactgaaagggcagtgatgggtatttctgttttcccaaagatttttcatatcatagtgtaattatatcaacaagcacccaaagttttcagaagtttcacaatatgcctacattaaggcataccagattatatagattcatttttaacaataaataaccccttaaataatattattttcctgaatctaatagagcaggttgttgatagaaaccttaatttttagttttattttaagatgaatgttcagattttcctcttttaaaaaagtcgaaatttgcatattctcagaagaagaatgattttttttcttttcttttcttttcttttttaactatagagtaatgttggagctagtgaagtctgcattgacaaggtttactgcagtggcaatcttaaaaagatgtggtagaatccatgcaaccatacaaggtatccattttctttacagcatgctgcattcctacacctcttaattaatgcttttcattggaaaaacaacaatcttggattcctgccttcattgaattctgacagagagtgtgtgtggttatagtggactgtatcagttcaaagacccaaagattagctattcgtttgtgcttgggttttaaagtggagttttctgagctttctttgttcagtattcactacaattgagtagattttggggaagaaatctgtactgtatttgtgtaaaattacaaaataacactggtttatgtctgatgttatatgttttccccaattttctttttattatcctttgtaaaattgcaaggcaatacagccttccaattacagggaccactgacaaacgtaaacagccatcaagtaccagttggcacacatctcctgtagtgcatgccattgccatcgcaccactcctcaaaaatgcacccacaagcttattcacaattacggatgccacgggaacagggaaaacagatcccgagggaagccaatggtgactgaaactactggctgacctgggaaacatgagcccatgtggcaaaaattagaaaaaaagtattcatggtcgaatctattggccacattgctaaggtcaaaaatctaactaaccaggatcagattcaataaaaattgtctgacttttatgccaagccatgcaggcctggaaaaatcaattttctggaacttgtaaagtcttacatagtcgaggcaaagttagcattcctctccattcttagtctcagagctggcttaggaggcctggagagacctgggtcagccacagccttggctgccctaagcaggttgtaatggaaacgggtaaccggaagaaagggtgaaaaacatgaacgtcgaccactgtcaagctatatgtttccatgccatgaactatcagtgtcatttatttattcattttcatttattcatcaaacatttaggggacttcaactctgagccaaaggctgtgctccaagttgggaaaatcaagatggaaacacatggtccctgttctcagtgagaacacagttaagcaatcacaaggtagtgccacaaagattcttcaaaggaatgtagaggatcccatgagaacatccaaaaaagtcgtctaatgaattaaagactgagagagtaagagtctgttaccaaggaggtgacagcttagattagccttgaggtctgtatagagacgaatagcctgagagaggaagaacctatttgtgtaagcatcaggggtaatgatgtggagatgtctgtgtgtctgtgtttgtgtgtgggtgtgtgtaacaggatagcgagagagtagacagagagagacagagagacaaagagagactgagagagagaggcagggagaaacagaatgtgtatgtgtaagagagagagtcagagagaggagagagagggagagagacagaggcagagagagacaaagtgtgcatgtgtgtgtgtgtgtgagagagagagagagagagaaagagggagagagacagagacaaagaccaagataaagacagagacagagagagaatggaaagagagagcgagagagaagatgatgaactggaggtggccctgtgtcaggctgaggaatttgaattaatcctgatggctttggaaagccaaagctaccaacatttttgagcagaggagacacatgttaacattacattttagaaagagcctggacgtatgtggaagatgaattggagcaaagctgaagccagagacattgtatgtttaaagaagtcactgtagtaatcaaagagagttgagttggttggggggatgtattaaaaagtttatggtgatgaaggcatgggaatcagaactgggatggttggtgtagagatggaggcatgtaggacgatgacctactctctgcctttgttgactgaatgaagaatggggtatgcatcaggctaggcacacagagggaaggggcagatgtaaagggtgaggcaataaaatgtgtgtgtattggtattggggttaagtaggcaactgggagcataattctgggttaaggataaagtgggcgtcatcagtctgtgggttatggttatatatttggggtataatggaggaaagctgaccaaacagagaaatatcaagtaaaaagagattatggcttaggacaaagtcctagagggtagtaaggtgaggttaagacagcagagaaactcaaaatcactgagtagccatcgagagaggaaggccaccagagaacaatgacttttaatgcaaggaaaaaaggttctaaaaaagagggccagtttcattttctgcagaaaggtcagcaagataaaaagtgtggagcagtcttaagagggctgggcttgaggcttggtgacaagcagccctgtgacacacaaagtttgtggaggctgcatgctgtgttgtaagcacgcagcagaaatgatcaggacagggtgccaggagatattgccctgagccagttcagagagtatggcttctaggatcttccagttactcatgggagaggatcttgtttggattgtgatgacaatctgcctgttgaagataggattctgccaggtcaagagtagccctgagtgggggattattaaccttgtaaatctccaaactccactcctttttaatgtaaaaatggccttttcatgttactggaatcaggttccaagtaccatattttattgtgccaccctcccttctgtctacacagtccactggtggtataaaatggcttgataagaccatgcaaagtggactggggtttgctatcctgctggagatttcttttagttcattttgccacactgaatctaaagatgggaagaaaaccaaacctggagtaaactactggtctgacattcagggactctttgattctagctttgggcttcctggggtagatgctgccagtgccccatccccacccctttggcacctgctctttttgcatcattgttggctttctatctcaggcacccagaactatgcctgagagctttttatgtcctagcaaggtgtcctcagcccaggcacagggtagcccattaatgctggggagttcatgtccatctgcaaggagcagccctcacatgaatgctgatgagaattggtggataaatgttgcagcttccttgcccctggaaacaaggaagaattgccatggggcaactccgatgcactgtccctggaggttctcagcagggttgcttaatgaccgcaatggaaacatgcttgatccacaccttttaaattttttttgctgccttctctttcttgtctcatttccctattctcttaggggtggttcctgggatcaccgccaaaataagtacttgcgtgtgaatccttgtttcagggtccactagtggagaaatccaacctaatcgccaaccaaatccaaactcaaaaagctcaaatgtacttggtatcataaattgagggctaaagagaggactaggtatcataggaatgaatccatcagtccccaaacccagaaaaataaaggtagctttatttttctcttactatgcttagtttcattctggtcatctgccctatggggctgcctgtcctcttccttttggtcctttcttggctcaccttgaaaagaggaagagaacattagcatctccacctgggacggtggtgatgaggcaagtggccagggcaggccccttgcactggtgctcttgccacccaagtgggcttgcttcaatttactgtagaggtgcaaggctggtaactcaccactaagtccgcagagctgagaaaatatttgcctaaagattagcaggggaggccccttctgatttccaatgtgctggacctgatgagctccaggcttttaaccgcctcaggctagagttagggaaatatagctctggcctgtgagtgtgtgtgggtttggtggtggggggctggggctgggggacactgttctaggggttggttgtgggcatttcccacacgcagccagctgttctggaagggcccttgcttctccccctggtcacacagcacctgaggatgccaggcatttagtatctctcatagctgacaactgtgttttggtctgcagggtgacctacactttgctggtatagaggaaattcagcgaattaaccaaattctctggtgcagaagagctgtgcagattgagttgtcagctgaactcgctttcctgttggttggttaagttgtcccagggcctctctgccgtttctaaatgagaacttttactatggagtagaaaaaatggccttctactcctagagtacctgagggtacagtccaaagcaaccgtgacaagtgtcaattattttttaagtctgctgtttttaagtttgaaaatttaagtaaattttgcatacgtttttattttagttttataggatattttaaatttcttgtcacgacgcaggagccacattgtgttattttgtggcttcatgtctttagcatctgaccttatcgtctatatttctccagtgagaagcaaagtgagggatggagtactagaggcaggacaggaattaggggcattttacctggttctgcacctaagtgaccatgtacacttgggtaagtcatggcagctctattgtcttctgtttcttctcccagaaggtgaggtggagggtgggatgggacaatatttgcacgatgacttctaaaattcctttggctcttacattctaagatgtatcctgtgattttaggtattctgatgatgttttcgtttttttttttttttttttttggagatggattcttgctcttttcatccaggctggagtgcagtggcacgatcttggctcactgcaacctctgcctctcgagttcaagagattctcctgccttagcctcccaaatagctgggattacaggcatgcaccaccgcaccccggtaattttttgtatttttagtagagatggggtttcaccatgttggctaggagggtttctatcccctgacctcatgatctacctgcctcggcctcccaaagtgctgggattacaggcatgaaccactgcacctggcctctgatcatgttttctaaacatgttctcatgtttaagtaaatgaacatacactgcttattggaaatgaatctacaaaacatatttgaagggtagatgatctgaaagtagatgacattagaccaaaccatatctcagaggctgtccctaaaggtattgaagacttgagagctcaaagagaaacaggaagtaacttaaaacaatttatgaacttttgaaagactgatgggaggatgttctcaatcaagttgggtatcagcatgcatattttattagctggaaggagaagttgcgtaaggtgctgggaaaatataacattgggggtttttatttttattttgacataatttcagtatatacaaaatatacaatatatgcaaagcatatttttttcttaaacatatgagaatactttgaagacatgatttcatcataccctttatctctaggtagttccagttgcatttcctaagatccagggcattctcttacataaccacagcataaaatcaggaaagcagatactgatacaatactactacctaatctataatgcacatttaaattttgtaaattgtttcaataatgtcctgtccagggtaaaaattcttggtttaggatccaatcatggattatgtataacatttagttattatgtctcttttctgttatttaatctggaatgattccttaaccgttctctgtcttcctaaatttcatatttttgaagagtactggtcaattgtttagtagaatgtccttcactttacatttgtctgatgtttcttcagggttagattcaggtcatgcatttttggcaaaaacaccacataaggtggcaggtcctcagtgcaacacatgaaattggtttgtcctattacaggtgaaaataatttcatcacttgttaaggtaattttaaaaaatctgatccttgaattaaatatactgtaaggttgaaatttgctgattcttcttgatgctgacctctctagaagaaacagcctcattgcaacagtgccacctgctgaaaaaaagaaatgactgtcttagaatttaagtccccagatacagctttgattggaagctttgatggcttccaaatattatataacttaagataaaatctaaactttccagaggtgggattggttagatagcaaagcttggtcaagagtttaaggcagttgaaaaggaaaatgtagagcagaaggtaattgtatgaagaacagggttaaacaggttctagtgcctcctgggggtttaacctctcagagcaccttaggaaggcaccgctcatcatgagaggctcccattcctaattcagaaacagaaggacccagacctgtgggtgggcttcaccttctcaggtaatacctgatagtccaccaggcagacgggtttggcgatgcttccagcactgaacactctctgggtttgctagaactacccaggccaacacctcaccacttttttttcctctcatttttgtaatgtggcttcttataaatttaaacttgtttcagcatttgccttgttgcctgtctggaaataacaagttgtttgttttgctttataatttgagaaacaggctaccattcccttcccatcatggaaaacattctgcaatgatctgtatcatcttccaatcatggtaatcactgactaacctgttttcaccagagaggttttttatctaattggaagtttgagcctgaaactcagagaagataaatggacaattttggtctcacgtgttttgtttaatcactcatttctgcgtaaacaccatttcttgaggtatggaaggatataagatctgttgatgatatttgaatttgggacaagttatttttatcctgttattggccattcttgaccatcaagagccaaaaaattgatctggaattgaaggagaagtgggaaaacatgaaagatgattttggttctgtagttaagagatggaagagttaatagcacaatctgaatgccaaatacaagaatatctgatgagatcatctcagtctttattatttagatctggtatctaggtggatgagtggaaggaacaatcgactgctcagaccacagccgagattgcagagatggcacttaactgtggactaacacaaagaggagcccatcaaaggagagcaagcaagatgaaaaagaaaccaaatgtcaggccacatgatgaagaattgggaactggggaaacactggacttgggaaacaacatttaagacaaaggaggacagaatagctaagtgcaactatttacgaatctaataagttccacactttacttcttttgacccaagaaagaattgctactagtgaactgaagttgcagagaaatacatgccaccttatgatgaggaatacaacaaaatctaacaattggaagtatccaaggatggtttaggatgatctggagagggaagttgtaggataggtatgtgtgaccaaattatatgaccttaatgtcccatatatcttgagattctatgatttaaagatgcctttagtatttaatccatggcttgacccaatccatagtcaactttttaatctataacattttaaaagataagcaaataaagccaagttggttagattctcccacccaaatccaagcctaaacttatgtaattgacattggatttattagtcgcaaaaattatgtaacacatgggaaatatatatttgtaaaaaaaaatgagagttttttaaggtcaactctttgttaaaagaatttggcattaagtaaatgttacatctactaaatatttaagcttaatcactatgtgaacaaatataattattcctggaaataatcaaggaatatttccagaaatatttatgacatggaggaagacgtggaaatactccatgtcttcattagttatttagtttataaagttgggctctctgtattaccatttcataacatttggaaaaatccacaatgagaaaaaaaactcatttgtttctgaacatttttgaatgctattaggctgactcgtgtcaaatttttatttgaccattttaaattaaaatatttattgaaaaattataggttgacatgcagttgtgagaaataatacataaagaatttatgcaccatttacccagtttcctccaatggtaacattgcaaaactatggaacatttttgatctataaaagagtagttttatatggttaaacctaatatagatggaggacaaaaatcacaatttttgctgggttaggctgcatgaataatcctaaactctcaaactgaagtaactttgacggcattgaaatatgggccattacaatgggtttatgttgtgggagaggagaggtttcaagggagattctagtggtaggcgagtggggctaatggttggattttaagaaatgctgtgaagatttcaggataatgaacactgggaaatagttaagatgcctttgatgaggacacacagggtggtggcaaacacaactcaaaaaccagtaagcaagggatggtgaagtgaaggcagcctgggctggtgccaggttagcgcgggctattctgtttgtagattaaggggaagatgttcactgagagaaataaattgcaagctgggtgacgtggcatgtgcctgtaattccagctacttgcgaggccaagacaggaagatcctttgagccaaggagtttgaggccagcctgggcaacatagcaagacctcgtctcaaaaaaaagaaaaaattggagatgcaggagaggttggagggcatgtggctgagctggagaatcaagagctttacctcagtgaaaagaagaaagaccttttttcctgcctatatggaaaggataatgggtaggatgactttgacattcagatgtcaacaggagggaatgctttgtaaaagtcgccggttttcacatgttttaaaaatagtgtactccattgtcttttctacactctttcatgaagaatgcagaaatacgaaagagatgatatcagggccggtcttgtcgaaatgaaggtgaagcccaacttctgcttcacctttaaaaagcccagaagttatgtaaattcattatgaaatgaaaagaatccacaatggaatgaaactggtaaagtattcaagctgcgtaagtcctggttttatcaggtcacaaaaattaattctcatatcattctgttgttttgcaaacaaactgcaagattgcagagggttttatttattttagacagcctgaaaacagcaaggtgtacaataacaggaataaccaggtcatttgaacaggatcgtgacagctattgatgctacctgtccagcctggacatgatttggcctgaccaagcacccaagaaggctcagtgggttgtgagcacaccctgagccaaaagcgttatgggctgctccaaaccaagtgtacttttaacgtggattaataaaaacctgatattcgggttcagaaatatgactgttgcattgtaaggctacatctagagtagtgcctttcttctgggctccacatttagaaaggacagggacaaagtaaagaatttcagatgaagaggaacaaaatgggaaaggccatgaaattgatttgttatacatatttgttcagggaaagaaaggacagaggcagaatgataagaggagcaaggaacacaggacagagggaagggatgaggaaggcacataaagtgatgacatgtggttatgatttaaagaggttttttcagaaatgaatatgaataagcttaaaaggggagaagcagatttatgaaaggtgataagaagatgcaggacaggagtatcagatatggcttgccacctcccaccactgtaaatgtcatctggggtaatttgcagttgtcaagatttaaagctttaactcctaccactactcaagatgcttaagtaagaattccaatactctgaaatctagttctgtatacccactccaaattcatttgggtgttaaacacatgtgagcattccaacataaatatttatagggcaaagaccttagaaagcacagcctatgttttccatattgtattccacagaaaaacccaacccccttgcctgctctttcccctgcctctcactcccccactctccttctaaatcttcttccttctctccctcctcctcttcctctttcctactcctctccctctccctcctcctcttcctctttcctacctattcgtctttcaactcattcttataaagcaccactgccttccatgcaccgcatgtactgttgaccaaaaacaggtttggcccctgttctcacggagctcatactgagtgggggaagacagacattgaccaaactgttgtcaccttcataaattgtacattgtatttcttttattactacagaagtggaacattttgtctcatatctgtagtttgtatgatgctcatacaccttttaacccaggtgtgaaagccaactttattttatatatctgaacttaatttacttctgtagtccctatattgcccaattagagagttgatctatttctttccaagtttaaaaattagtccctttaatacctagtttattgaaagtttttaacatgaagggatgtcgaattttatcgaaggctttttctgcatctattgagataatcacgtggtttttgtctttagttctgtttatgtgataaatcccatatattgatttgcatatgttgaagcagctttgcatcccagggatgaaaccaacttgaccgtggtggataagctttttgatttgctgctggattcagattgccagtattttattaaggatttttgcgtcgatattcatgaaagatattggcttgaagttttcttatttgtgttgtatctctgccaggtttggtatctggatgatgctggcctcatagaatgagttagggaggagtctatccttttcaattttttggagtagtttcagtagaaatagtactgactcttctttgtaacactgttagtagaattctgctgtgaattgtctggtcctgggcttttttgtttggtaggctacttattaccgcctgtgttaatccgttctcacactgctataaaaaatacctaagactgagtaatttgtaaaggaaagaggtttaactgactcacagttccactcacacttacagtcatggcagaagggaaaccaggcaccttcttcacaaggtggcaggagaaagagtgagtgtttaggaggaactgtcaaacacttatatgcccatcagatctcatgagaactcactcactatcatgagaacaggataagggaaacctccccaatgatccaatcacctcccaccaggtcccgctctcagcatgtggatattatggggattacaatttgagatgagatttgggtggggacacagagccaaaccatatcactgcctcaatttcagaacttattattggtccattcagggattcaatttcttcctggttcagtctttggagggtgtagttcaatcctgggacacatgtccaggaatttacccatttcttctagattttcttgtttatttacatagaggtgtttatagtattgtctgatggttgtttgtatttctgtggggtcagtaatgatatcccttttatcatttctgattatgtttatttgattcttctctcttttcttccttattagtctagctagcagtctatctattttattaattttttcaaaaaaatctcctggatttgtggattttttaagggttttttatgtctcgatctctttcagtttagctctgatcttggtttttttcttgtcttctgctagctttggggtttgttttctctcggttctgtagttcttttagttgagatgttaggttgttaacttgagatctttctagcttcttgaggtgggcatttagtgctataaatttatctcttgacattgcttcagctgcatcccagagattctggtatgttgtctctttgttctcattagtttcaaagaacttctagatttctgccttaattttattatttacctaagagtaattcaggagcttccatgtagttgtgtggttttgagtgaatttcttaatcttgagttctaatttgattgtgctgtggtctgagagactgtaatgatttcaggtacgatgtttggcaaacccacagccaacatcatacttaatgggcaaaagtggaaacattccccttgaaaactagtacaagacaaggatgccctctctcagcactcctattctacgtattactggaaattctggtcaggacaattgggcaagagaaagaaataaagggtattcgaataggaagtgaggaagtcaaaccatctttgtttgaagatgacatgtttctatgtctggaaaaccccattctctcagccccaaagcttcttaagctgataatcaacgtcagcagtctgaggatacaaaatcaacttgcaaaacccactaacatttctatatactaagaagaggcaagcaaggagccaaatcatgaatgaactcccattcacaattgctacagaaagaataaaatacttggaaatacagctaacaggggaagtgaaggccttcttcaaggagaactacagacccttgctcaaagaaatcagagaggacacaaggaaaaggtaaaatattccatgtacataaataagaagaatcaatatcgtgaaaatggccatactgcccaaagtaatttatagattcaatgctattcccattaaactaccactgacattattcacagaattagaaaaaaactattttaaattttatatggaattcagactctgaaaacagagccgaaatagccaagacaatcctaagcaaaaagaacaaagctggaggtatcacactacccaacttcaaactatactacaaggctatgataaccaaaacaacatagtactggtacaagaacagacacataaaccaatgtaacagactagagaactctagaaacaagaccacttgcctacaaccatctgatcttcaataaacctgacaaaaacaagcaatggggaaaggatttcctatttaataaatgttgttgggagaactggctggccacatgaagacaattgaaactggactccttccttacaccatgtacaaaagttaacccaagatggattaaagacttaaatgtaaaacaccgaactatataaaaaaaaaaaaaccctaaaagaaaatctaggcactaccattcaggacacaggcacaggcaaggatttcatgatgaaaatgccaaaagcaattgcaacaaaagcaaaaattgacaaatgggatctgattaaactaaagagcttctgcacagcaaaagaaactatcatcacagtgaacagacaacctgcagaatgggggaaatttctacaatctatccatctgatgaaggtctaatatccagagtttactaggaacttaaacaaatttacaagaaaaaaaaaaccctattaaaaagtgggcaaaggacatgaacagacccttctcaaaaagagacatacatgtggccaacaaacataagaaaaatgctcaacatcactaatcattaaagaaatgtaaaccaaaatcacaatgtgataccatctcacatcagtcagaatggcaattattaaaaagccaaaacacaacagatgctgataaggttgtggataaaaaaaaatttactattggtgggaatgtaaattagttcaaccattgtggaagacagtgtggcaattcctcaaagacctagaggcagaaataccatgcgacccagaaatcccatttctgggtatttacctgaaaaaaaataaatctttctattataaagacacatgacacatatgttcattgcagcactattcacaatagcaaagacatggaatcaacctaaatgcccgtcaatgatagactggataaagaaaatgtggtaagtatacaccatggaatactgtgcagccataaggggacatggatggagttggaagccattatccttagcaaactaacacaggaacagaaagcaaaatgctacatgctctcatttataagtgggagctgaatgctgagaacacatgaacacatagtgggaaacagtacccactgggacctcttggttgggggctggagggaaggagagtatcacaaagattagctaatgatcaaaacttgggaaaagtcctggagccaagatggccaaataggaacagctccagtctacagctcccagtatgagcgatgcagaagatgaatgatttctgcatttccaactgaggtaccaggttcatcttactggggattgttggacagtgggtgcaggacagtgggtgtggtgcactgagtgtgagctgaagcagggtgaggcatcaactcacccaggaagtgcaaggggtcagggaattccctttcctagccaaggaaaggggtgacagatggcacctggaaaatcggatcactcccaccctaatactgcacttttccaatggtcttagtaaacagcaaacgagaagattgtatcccgtgcctggcctgcagggtcctatgcccacagagcctcgctcattgctagcccagcagtctgagatcaaactgcaaggcagcggcgaggctgggggaggggcatctgccattgctgaggcttgagttggtaaacaaagcggccaggaagctccaactgggtggagcccaccacagctcaaggaggcctgtctgcctctgtagactccacctctgggggcagggcatagccaaacaaaaggcagcagaaacctctgcagacttaaatgtccctgtctgacagctttgaagagaatagtggttctccaagcacgcagcttgagatctgagaatggacagactgcctcctcaagtgggtccctgactcccaagtagcctaactgggagccaccccccagtaggggcagacagacacctcacacggctgggtactcctctgagacaaaacttccagaggaacaatcaggcagcatcatttgctgttcaccaatacctgctgttctgcagcctccgctgctgatacccaggcaaacagggtctggagtggacctccagcaaactccaacagacctgcagctgagggtcctgatgttagaaggaaaactaacagaaaggacatccacaccaaaaccccatctgtaagtcaccatcatcaaagaccaaaggtagataaaaccacaaagatgggggaaaaacagagcagaaaactgaaaattctaaaaataagagcacttctcctcctccaaaggaatgtggctcctcaccagcaatggaacaaagctggaccaagaatgattttgatgagttgagagaagaaggcttaagacgatcaaactactcctagctaaaggaggagttcgaacccatggcaaagaagttaaaaaccttggaaaaagattagatgaatggttaactagaataaccaatgcagagaagtccttaaaggacatgatggagctgaaaaccatggcacgagaactatgtgatgaatgcagaagcctcagtagcttattcaatcaactggaagaaagggtatcagtgatggaagatcaaatgaatgaaatgaagtgagaagagaagtttagagaaaaatgaataaaaagaaatgaacaaagcctccaagaaatatgggactatgtgaaaagacaaatctatgtctgattggtgtacctgaaagtgacagggagaatggaaccaagttggaaaacacgctgcaggatattatccaggagaacttccccaatctagcaaggcaggccaacattcagattcaggaaatacagagaatgccacaaagatactcctcaagaagagcaactccaagacacataattatcagattcaccaaagttgaaatgaaggaaaaaatgttaagggcagccagagagaaaggtcgggttacccacaaaaggaagcccatcagactaacagcggatctctccacagaaactctacaaaccagaagagagtgggggccaatattcaacattcttaaagaaaagaattttcaacccagaatttcatatccagccaaactaagcttcataagtgaaggacaaataaaatactttacagacaagcaaatgctgagagagtttgttaccaccaggactgccctaaaagagctcctgaaggaagcactaaacatggaaaggaacaactggtaccagccactgcaaaaacatgccaaattgtaaagaccatcaaggctaggaagaaactgcatcaactaacgagcaaaataaccagctaacatcataatgacaggatcaaattcacacataacaatattaactttaaatgtaaatgggctaagttctccaattaaaagaaacgactggcaaattggacaaagagtcaagacccatcagtgtgctgtattcaggaaacccatgtcacatagagagacacacataggctcaaaataaagggacggaggaagatctaccaagcaaatggaaaacaaaaaaaggcagggattgcaatcccactctctgataaaacagactttaaaccaacaaagatcaaaagagacaaagaaggccattacataatggtaaagggatcaattcaacaagaagaactaactatcctaaatatatatgcacacaatacaggagcacccagattcataaagcaagtcctgagtgacctagaaagaggcctagactcccacacaataataatgggagactttaacaccccactgtcaacattagacagatcaacgagacagaaagttaacaaggatatccaggaattgaactcagctctgcaccaagtggacctaatagatatctacagaactctccaccccaaatcaacagaatatacattcttttcagtaccacaccacaactattccaaaattgaccacatagttggaagtaaagcactcctcagcaaatgtaaaagaacagaaattataacaaactgtctctcagactacaatgcaatcaaactagaactcaggactgagaaactcactcaaaaccgctcaactacatggaaactgaacaacccgctcctgaatgactactgggtacataaggaaatgaaggcagaaataaagatgttctttgaaaccaacgagaacaaagacacaacataccagaatctctgggacgcattcaaagcagtgtgtagagggaaatttatagcactaaatgcccacaagagaaagcaggaaagatctaaaattgacaccctaacatcacaattaaaagaactagagaagcaagagcaaacacattcaaaagctactagaaggcaagaaataactaagaccagagcagaactgaagaagatagagacacaaaaaacccttcaaaaaatcaatgaatccaggagctggttttttgaaaagaccaacaaaattgatagactactggcaacactaataaagaagaaaagagagaagaatcaaataggtgcaagaaaaaatgatgaaggggctatcaccaccaatcccacagaaatacaaactactatcagagaatactataaacacctctacacaaataaactagaaaatctagaagaaatggataaattccttgacacatacaccctcccaagaccaaaccaggaagaagttgaattgctgactagtccaataagaggctctgaaattgaggcaataattaatagcttaccaaccaaaaaaaagtccaggaccagatggttacacagccgaattctaccagaggtacaaggaggaactggtaccattccttctgaaactattccaatcaatagaaaaagagggaatcctccctaactcattttatgaggccagcatcatcctgataccaaagcctggcagagacacaaccaaaaaagagaattttagaccaatatccctgatgaatatcgatgcaaagatcctcaattaaatactggcaaaccgaatctagcagcacatcaaacagcttatccaccatgatcaagcgtgcttcatccctgggatgcaaggctggttcaacatatgcaaatcaatatacataatccatcatataaacagaaccaatgacaaaaaccacatgattatctcaatagatgcagaaaaagcctttgacaaaattcaacaacccttcatgctaaaaactctcaataaattaggtattgatgggacgtatctcaaaataataagagttatctatgacaaaccaatggccaatatcatattgaatggacaaaaactggaagcattccctttgaaaactggcacaagacagggatgccctctcccaccactcctattcaacatagtgttggaagttctggccagggcaatcaggcaggagaaggaaataaaaggcattcaattaggaaaagaggaagtcaaattgtccccgtttgcagatgacatgattgtatatctagaaaaccccatcgtctcagcccaaaatctccttaagctgataagcaacttcagcaaagtctcaggatacaaaatcaatgtgcaaaaatcacaagcattcttatacagcaataaaagacaaacagagaaccaaatcatgagtgaactcccattcacaattgcttcaaagagaataaaatacctaggaatccaacttacaagggatgtgaaggacctcttcaaggagaactacaaaccactgctcaatgaaataaaagaggataaaaacaaatggaagaacattccatgctcacgggtaggaagaatcaatatcgtgaaaatggccatactgcccaaggtaatttatagattcaatgccatccccatcaagctaccaatgactttcttcacagaattggaaaaaactactttaaagttcatatggaaccggccaggcgcggtggcttacgcctgtaatcccagcactttgggagggcgagatgggcggatcacgaggtcaggagatcgagaccatcctggctaacatggtgaaaccccgtctctactaaaaatacaaaaattagccgggcatggtggcgcgcgcctgtagtcccagctacacgagaggctgaggcaggagaatggcgtgaacccgggaggcggagcttgcagtgagttgagatcgcgccactgcactccagcatgggcgacagagcaaaactccgtctcaaaaaaaaaaaaaaaaaaaaaagttcatatggaaccaaaaaagagcccacattgccaagtcaatcctaagccaagagaacaaagctggaggcatcacgctacctgacttcaaactatactacaaggctacagtaaccaaaacagcatggtactggtaccaaaacagagatatagacccatggaacagaacagagccctcagaaataatgccacatatctacaactatctgatttttgacaaacctgagaaaaacaagcaatggggaaaggattccctatttaataagtggtgctgagaaaactggctagccatatgtagaaagctgaaactggatctcttctttacaccttatacaaaaattaattcaagatggattaaagacttaaatgttagacctaaaatcataaaaaccctagaagaaaacctaggcaataccattcaggacatgggcatgtgcaaggacttcatgtctaaaacaccaaaatcaatggcaacaaaagccaaaattgataaatgggatctaattaaactaaagagcttctgcacagcaaaagaaactaccatcagagtgaacaggcaacctacagaatgggagaaaatttttgcaatctactcatctgacaaagggctaatatccagaatctacaatgaactcaaacaaatttacaagaaaaaagcaaacccatcaacaagtgggcaaaggatatgaacggacacttctcaaaagaagacatttatgcagccaaaagacacatgaaaaaatgctcctcatcactggccatcagagaaatgcaaatcaaaaccacaatgagataccatctcacaccagttacaatggtgatcattaaaagtcaggaaacaacaggtgctggagaggatgtggagaaataggaacacttttacactgttggtgggactgtaaactagttcaattattgtggaagtcagtgtggcgattcctctgggatctagaactagaaataccatttgacccagccatcccattaccgggtatatacccaaaggattataaatcatgctgctataaagacacatgcacacatatgtttattgtggcactattcccaatagcaaagacttggaaccaacccaaatgtccaacaatgatagactggattaagaaaatgtggcacatatacaccatggaatactatgcagacataaaaaatgatgagttcatgtcctttgtagggacatggatgaagctggaaaccatcattctcagcaaactatcgcaagcacaaaaaaagcaaacaccgtatgttctcactcgtaggagggaattggacaatgagaacacagggacactggaagggagcatcacacaccagggcctgttgtggggtgggggcaggggggagggatagcattaggagatatacctaatgttaaatgacgagttaatgggtgcagcatgccaagatggcacatgtatacatatgtaacaaacctgcacgttgtgcacatgtaccctaaaacttatagtatatatatatatataaaaagaatagctaatgaattctgggcttaatacatggatgatgggatgatctgtgcagcaaactaccatggcacacattgacctatgtgacaaacctccacatcctgcacatgcacccctgaacttaaaatgaaaatttgaagaaaaaagaaattagttcaatcccaaaatatcttgatacaatttggtaatgtaaactgggtccattcttatccaaaagtctctctattcaggactcagccatttttcttactctttggagttgtacctaagcctcgaagaggttaggcacattatttcctcggattgcggctcatgaaggggtgtcacatccaggactgtctttgggccatgctgagctttgcagagatataactcaccttatcaagtttctcagtggggtgccctgattcccactgccataccactctcatgtgccctttaggttgatgccagtcatttttctattttcccagaaatctcaaagaacttgcacatgaagttatttttgaattttattgttctttaattcactacatttagcatatatctttattagtgccttccttttgcttttgctggctatttacctaccccacctaccttcttgagttagtttttcatgtcatttaactttcttctttattgttttttaataaaaatatttaagtttataaatgttattctgagtacagtgtttgtcacatggcatagattgggatttattgttttccaaccattattatttctaaaagattataattgaatttttaatttcttttttgacccttgcattcattcagaaattttatttttcaatttctaagggattagagttgtgctgttgttgttcttgttaatgtttgtatttataagtatgtttataaaatttgcacctttgggaatttgtggagtctttatggaaattttgtaattttataatttcacaaatgttccatggacatggaaaaaaagaggttttactgagtttgacagtaccaatatagagtcatctctctgtgtctgtggaggattggttctagcatctcccgtgcataccacaaccaatgaatgatcaagttctgccattggtcctatatgacctgcagatttgaaaagtcagccctctgtattcaagaggtctgcattactggaatattatatttttgatctgtgattggttgaatctacttgtggatatggagtgctgactgtatatccaatacatccacaattcctaaaattttttcctctcagacacttcctaactctgactattttccattatgtacctagaactgttagatctttgcaaaggctgaaattactttggcaccaacctaatagctatcattgtagtcagagcaggaagtatcctgtgcgtccacggtttgggattctctaggactccaaaccaagtaggatggtgactagcattgtcaagagctaaagctgggtatgcttttcttccttccatgcctcggcatccccagctcatgtagccactggtgggtcatttgcagcggggagtgtccaacaaaattagtactttttctttggttatcctttgtctcaaactccaacccggaggtaaaattattaggagaacattgttgagatttaagctttctgttcatttacatttgtataattaatctttattcattgctttggttttaacagttctttattattttgtatatggcaatgcttttatacacagaaaaattgagtagaccagttttcaaatccaaacagaaacttttataataataaggctatttaacccatttcatcctattgtacaaattaatagcttggtctctataatttagtttgtaatccctcacaatttttaaaatgaatcctctgttttctgtttctctgttttttctgttgctatacagaatataatctcttagctttccaccatcgaatctacttgacaattgcacgatgagggatacgccatactctaactcaagcttgtctgacctgtctaattttgttgtaatagttgttctgtttcattttattttgggcttgtagcagctggaagccatagtttttagtttctgtctcctgtggtaagtggaaaagagggatgaggaagaggctgtactggcccaaccagaaaccgaaactgagaacccatgactgtatcctctctcttggacgcctctgctagcctcttaaacacaaaaatagagagatcccagatgtgctgtatttcccagccctccttccctggctatagtcactgtctgtacttccagacctcccattttcttcctgatccatgccaattagggtttcttattcaatgcttcagtgaaaaataaaaaactatattatagacatcagtgggctgcatcttgcccaagccaagagataagttttggtcctcatcttaatgactacttagctgcatttgatattgttgacgtttcttctttaaaaatattttcaaagcccctatgatgctacttctgtcttgttttttactccactcttgctatcttacctcctgctttttttttcagtgtatgtctcctctggtcacatgattatatttatggggtgcacttgatcctctactgtgttattttctattcctacatgatcttatttagtaccgtggctttaaagaccatctgttgatgactcccaagtcagtatttctggctccattctcctcaaatggtaaactcaaactgaatatctccttttggatatctgaaaggcatctcaaatccaacatctcaaacattactctgagttctccaccccatatgctcctctaaaatctttcccatgttattaaatggtcccaccttaaacacacacctaagagcaattcttcactcttctccttcccaaaagatctacatctaatttatccataagtcctatttgctcaacatcccaaatacatactaaagttgaccacttcactccaacttctctgccataaaccaagtctaattcaccggcacttctcttgggctactgctaaagtgtcctacctaattcattttaatctatcaatactctctgagttcttactaggtgtcagatgttttataggacttaatgatacatcagtgaataaaacataaaaagattgctaccctaatgaaatttatgtttaattagtgcagacagacaataaagaaaattgtgtgtgtttgtggtgggggcgggggttagatggaagtcataaatgttatgaaagaaaaataaaagaaatgggatacaaggataaggagaagacttaggtaagttgtactttaaaataaagtggtcagacatacatcacttcaaaatgaacatttgcataaaagtataaagagtttgagggagtaagatgcatggattctggagacaacatgtgaacatgtcctgcagagtcatcatagttggcatgctggaggaacaagaaaaaggtccatgagggtggggtagagtaaaatgagcaaaggagaaagtattgtgcaaaaaggtcaagataacagggacagagagacgtgatagggacatgggcatattgtatgctgagtgggggaaaaaaccccaggagcgtttttgttctgctttgtttagctatcttaaaatgtaagcaatttttagaatagtcttagatttatagcagtgttgcaaatctaccgtagagagttcccatataatgttcacccagtttcttttgttgttaacattttatgttacaatgataaatttgtcaaaagtaatgaaacaacatcagtgtattattattaaataaactccacaattaattcaaatgttactagtttttcccatgtcctttttatgttccagtattccatccaagataccacattgcattgagttttcatgtgttcttagtctcctctgaactttgatagtttctcagattttcactgattttaatgaccttgtcagttctcatgtatactggtcagaatatcgtatatcctactatttgggtttctctgatatttttctcatgtttagatgggctttgcggagagaatattcaccacaaaatacataaaattagaacacaaatataatagtcaaaacacccttgagaaattataagactcatttcttcaaaaattattaaacagtaaatctaaggaaatgttataaaatatttaaaacagactgctgtatattagaaccaatagtatgcacccttaagctgtaattaagggacaaatttatgattaattaactaatattcaaatccaaaaggtgaaaaaaaggaacaatacaaaatctaaaccaaatagaaagaaggaaataaaaataaaagacaaaagtaattaagtggcaaataaaaagtagagtggatcgttaagactaaacactatttttaaagaccagtataacagacaaatgttttgatggtgaaagagagtgagagtgagagagagaaagtgagtgagaaataatataaacaaacaatatcaggaaaaaataatggagcacaaacatataatgaagtattttagaaactatgaattgatatgaacaactgtatgccagtaggttaaaagcccatgcaatggacaattttctaggaaagtgtaaatgccatgattagtcttcacaaccataaaacaagtattaatacaaattgaaatggtaatcagtatcttattcccaaaggcatcagacccacatggtttttccagtaactttcagcaccaattcaataaacatatatgtctcattatagcttaactgaaaaaaagtgaagccacgcaagtcattttataaggattgaataatactgttaggaaaactagaaaaggaaaacacaaagatgcacttctttgtttcaaaactataaatacaacaaaaattatttcattgttggtttcacttcagggaaatgctgattcatctttgtgtgtaatacaaattcaatttgtggttaataaaggttaataaaggggactataattttaaaagcacaataagccaatataatattcccaatttacttcttcaacacttggcctgcagttataactatttaaaaagtgaacattaaggcaaagatttctttctacatgttggaggagcattgaagaagaaataaacatttcctcatttttgcttagtaagcacattgagacaccaaggtgggtggatcacctgaggtcaggagttcgagaccagcctggccaacatggcaaaatgccgtctctactaaaagtacaaaaattagccaggcgtggtggtgcatgcctgtaatcccagctactcaggaggctgaggcaggagaattgcttgaacctgggaggcggagtttgcagtgagctgagattgcaccactgcactccagcctgggcaacaagagtgagactctgtctcaaaaaaaaaaaaaaaaaagcaaggtaaatcttattattttccttccttcaactggctatgaacttgttttaatttattaccactgatttgaaacaaccttatcataaaagttcccagttgtacctgcatctatttattcactcttttctatggataggaccatctgttctgatcattacacacacttatcaattatgaatcctttcagatgactacaatgccattttctttccctcacaaaacaagaagtcaaaacataaatggttgctgatgctctttctttagtttatttctgtaaaaaataaattctctgagattcttatgatgttttcaatatggcaataagctggccattatgcccttgttcaaggcaagaagagagagagagggcaagagcactctctgcatgctcccacagctgacccctgcagctgagctcatgaatgctggcagtcatgacccctgcagatgctatgcacaagcagctgtatctgactcttgtcactgacccacaccaccatgtttatacctacagctggtccctacagctatgtgcatgcatgctgccagttttgtccctgcagctgtgcacatgcatgtagtttccagatccatgtcgtcatgctccaccaccatgcacatgccagaagctagctcccacagtcaagaatgtgcacaccaccagcactggccctcactgctacctgccttctctgatctcttgtcactatagccataggcactgttgaggaccctcaacagcccttgcagccactacaaaccttctgcagttctggcaaccataaaccatgcaattgcaaaccctagctacctgagctgatgagacactgcacctccctagacctggaatcactgtacctcctgcacttggtgccctgtgtcactagatccagtgccagagcatattccagtgtgtcccacggcccacagttgaaggtttttccttattgaagccaatccataaagtctgtaagagatgactgcctgtttaaatgtgtagactcctatacaaagctacaagaatgacaaagaattgagaaaacatgacataatcaaaggacacagaaaacttccagtaaccaaccccaacacattgcagacccataaactacctgacaaaaaaaattcaaaaattattctttagaagctaattgagctatgaaagaacacagaccctcaatttaacaaaatcagcaataatataacaacaaaaaagaggttcaacaaagagatcaaattcataaaatggaaccaaaagaaaattttggagctgaagaatataatgactgcactacaaaatacaatagagagttttaacagcagactagataacacacaaaaaaatatagaaatttgaagatagatcatttgaaatcatctagtcagaggagaagaaaggaaaaggaatgaaaaggaatgaagtcctacaggatctatgagacagtatcaagagaactaatcttcatactatagaattttcaggagaagagaaagggaaagtaacagaaagcttttttaaagaatcaatggctgaaaactttccatttatgtggaaagaagatatgaacattcaggtacatgaacttcaaaggttaccaatcagattcaacccaaaagagttcaccaaaacatattataatcaaacttttaaaatcaaagataaagagaattttgaaggcagcaagagaaaacaagcttattacacacattggaattctattaaggctttcagcagattttgttgctgaaacttttaggccaagaaagggtgagatgacatattcaaggtgctaaaagaaaaaaaaaagaaacctgctgaacaaaaatattttacctggcaaagttcataaatgagttagagatataaagactttcccagataaacaaaagctgaaggagtttatcactactagacttacatcacaagaaatgctaaagggaattattaaagctgaaataaaaagctgctatttagtaatatgaatacatacaaaagtataaaacttgttgctaaaaaataaatatatagtcaaattcagaatactgtactactgtaactgtgatcacttataatccagtataaacgttaaaagttaaaagtattaaaaatgactacagctgcaataacttattaacaaatacacagtatataaagatgtaaactatgatatcaaaaatataaaatgtcaggagaatgtgaagtaaaagtgcagggcttttgtatgtaagcaaagtgagtaaccacaaaggaaaaaacttagaatatacacacaaaaaataaagagaagggaatcaaagcataccactacagaaaaatttcaaatcacaaaagaagacagcaagagagtaagagaggaataaggttctataaaacaacctgaaaacaatttacaaattggcaatagtaaacccttaccaatcagtaattatgttacatgtaaatgaactaaaacctccaatcaaaagacagagcagtcaaatcagtaacaaaacaaaacaaaacccaactatgtgctgcctacaagacactcacttcatctttaagaacacatagagactaaaagcaaagggataaaaaaagatatcctaggcaaataaaagaagccaaaaaacagcaggaatagctatagttatatcaggtaaaataaacttcaaggtaaaaaccatgaaacaagacaaataaggtcactatacaatgaaaaatgttcaattcatcaagaggatataacaattgtaaatgggtccaacatcaaagcaactgaatatataaagaaaatagtaatagatatgaagggagagatagactataatacaataatagtaggggacttcaaaactcatcaatggacagatcatccagacagaaaaccaataaggagacattgaacttaaactataatttagaccaaatggacttgagtgacatatacataacattctacctatcagcagcagcagcagcagattacacattcttttaaagtacacacagaacgttttccaggatagattataatataaggtcacaaaaaaatgttttaacaaccatataaagagtgaaatcatattcagtattaacaaattttaaaagattgaaatcatattgagtatcttctcttaccataatggtatgaaactggaaatcaataacaggaaaaaaactgagaattcacaaacatgtccaaattaaacaacatgtccctgaaaaaccaatgggtcaaacaagaaattttaaaaatttaaaaatatgttgaggtaactaaaaatgaaaacacaacatatccaaacttatagaatgcaatcaaagcagttttaagagggaagtttataggagtaaacacctacatttaaaaagaagatctcaaataaacagcttaacattacacttcaaggaactagaaaaagaagaacagattaagcccaatgttagtggaaggaagaaaataataaagatcagagcaaaaaatggagacttaagaaaccatagaaaagttcaataaaactaagagctggtttattaaaaagacaaaaaaaatcccaaaaatacaaaaatttagttagacatgtcacaaaaaaagtgacaagactcaaataatcaaattagaaataaaagaggagatattacaactgacacacaaaaagtgcaaaggattataagagagtaatatgaacaatcatataccaacaaattggataacctagaagatatgggtagcttcctagaaacatacaacctaccaagactgaatcattaagaaatagaaaatcttaacagacccataatgagtaagaagattgaattagtaattaaaaatctcccaaaaagaaaatttccagacattatgacctcatggttgaattctactgaacatgtaaagagctaaaatcaatcctataaactcttacaaaaattgaacaagagggaatacttccaaactcattttactaggctattattaccctgataccaaagcaagacacaaacactataaaaaaagaaaactacaggccaataaccctgatgaacatagataaaaaaatcctcaagaaaatgacacaaactaaatttaacagcacaataacaaagatttatgaaccattatagaatgggattaatctcaggcatgcaaggatgtttcaacatatgcaaatcaatgaatgtgatataagacattagtagaatgaaggacaaaatctgtatgataattacaatagatatggtataaacattttgccaaattcagcattcttttatgataaaaaaaaagtcacaacaaataaggtgtggaaggaatggaccccaacacaatgatgatcagatatgacaagcccacagataacatcacactctggtgaaaagttgaatcttttcatctaagataaataacaacgcaagaatgtccatcttatcacttctgttcagcatagtactagacgtcctagcaagaacgaatgagcaaaaaaaagaaatgagtcattcaaattgaaaatgaagaaggtatattgtcaccgtttgcagatgacatgatattgtgtatagaaaacctgaaagtgtccaccaaaaatcttagaaaaaataaataaattcaataaagttgcaggatacaaaatccacatacaaaaaccagttgcattgctctacactaataatgaatattgtattccaaaaaagaattcaagaaataatctcatatacaatagtgtcaataagaaataaaatacttaggaatacatttacccaaagaagttaaaaatctgtatactaaaaattatataatatcagtaaagaaaattttagaagacacaaattgatggaaagatattctatattcatgatttggaaaaattaatattattaaaatgtccatactgtgtaatgtgatctacaaattcattgcaatccctatcaaaattccaatgacactttcatataaatggaaaaaaaatcttgtagtttgtatggaaccacaaaagaccctgcacagctaaagcaatcttgatcaagaaaaagctggaggcatcacatttcctgatttcaaattatattaccaagctataataatcaaaacaatatagtattggcaaaaatacagacacatagaccaacggaacagaatagagaatccagaaataaatatacatacgtcgaaaagaaataatcactattttgaagagatatctgcactcccatggcatgcaacattattcaccatagctgatatatggaaacaagtttccattgacaacagatcaagaaaatgtggtcagattaacgagacagaaagttaacaagggtatccaggaattgaactcagctctgccccgagtggacctaatagacatctacagaactctccagcccaaatcaacagaatatacattcttttcagtaccacaccacaactattccaaaattgaccacatagttggaagtaaagcactcctcagcaaatgtaaaagaacagaaattataacaaactgtctctcagaccacagtgcaatcaaactagaactcaggattaagaagcacactcaaaaccgctcaactacatggaaactgaacaacctgctcctgaatgactactgggtacataacaaaatgaaggcagaaataaagatgttctttgaaaccaatgagaacaaagacacaacataccaaaatctctgggacacattcaaagcagtatgtagagggaaatttatagcactaaatgcccacaagagaaagcaggaaagatctaaaattgacaccctaacatcacaattaaaagaactagaaaagcaagagcaaacacattcaaaagctagcagaaggcaacaaataactaagatcagagcagaactgaaggaaatagagacacaaaaaaacccttcaaaaaatcaatgaatccaggaactggttttttgaaaagatcgacaaaattgatagaccactggcaagactaataaagaataaaagagagaagaatcaaacaggtgcaataaaaattgataaaggggatatcaccaccgatcccacagaaatacaaactaccatcagagaatactataaacacctctatgcaaataaactagaaaatctagaagaaatggataaattccttgacacatacaccctcccaagactaaaccagggagaagttgaatctctgaatagaccaataacaggctctgaaattgaggcaataattaatagcttaccaaccaaaaaagtccaggactagatggattcacagccgaattctaccagaggtacaaggaggagctggtaccattccttctgaaactattctaatcaatagaaaaagagggaatcctccctaactcattttatgaggccagcatcatcctgataccaaagcctggcagagacacaaccaaaaaagagaattttaggtcaatatccttgatgaacattgatgcaaaaatcctcaataaaatactggcaaaccacatctagcagcacatcaaaaagcttatccaccatgatgaagtgggcttcatccctgggatgcaaggctggttcaacatacgcaaatcaataaatgtaatccagcatataaacagaaccaaagacaaaaaccacatgattatctcaatagatgcagaaaaggcctttgacaaaattcaacaacgcttcatgctaaaaactctcaataaattaggtattgatgggacatatctcaaaataataagagctatctatgacaaacccatggccaatatcatactgaatggacaaaaaccagaagaattccctttgaaaactggcacaagacagggatgtcctctctcaccactcctaatcaacatagtgttggaagttctggccagggcaatcaggtaggagaaggaaataaagggcattcaattaggaaaagaggaagccaaattgtccctgtttgcagatgacatgagtgtatatctagaaaaccccatcgtctcagcccaaaatctccttaagctgataagcaacttcagcaaagtctcaggacacaaaatcaatgtgcaaaaatcacaagcattcttatatagcaataacagacaaacagagagccaaatcatgagtgaactcccattcacaattgcttcaaagagaataaaatacctaggaatccaacttacaagggatgcgaaggacctcttcaaggagaactacaaaccactgctcaatgaaataaaagaggacacaaacaaatggaagaacattccatgctcacgagtaggaagaatcaatatcgtgaaaatggccatactgcccaaggtaatttatagattcaatgccatccccatcaagctaccaatgactttcttcacagaattggaaaaaactactttaaagttcatatggaaccaaaaaagagcccacattgccaagtcaatcctaagccaagagaacaaagctggaggcatcacgctacctgacttcaaactatactacaaggctacagtaacaaaaacagcatggtgctggtaccaaaacagagatatagatcaatggaacagaacagaggcctcagaaagaatgccacatatctacaactatctgatctttgacaaacctgagaaaagcaagcaatgggaaaaggattccttatttaataaatggtgctgggaaaactggctagccatatgtagaaagctgaaactggatcccttccttacaccttatacaaaaattaattcaagatgcattaaagacttaaatgttagacctaaaatcataaaaaccctagaagaaaacctaggcaataccattcaggacatgggcatgtgcaaggacttcatgtctaaaacaccaaaagcaatggcaacaaaagccaaaattgacatatgggatctaattgaactaaagagcttctgcacagcaaaagaaactaccatcagagtgaacaggcaacctacagaatgggagaaaatttttgcaatctactcatctgacaaagggctaatatccagaatctacaatgaactccaataaatttacaagaaaaaaacaaacaaccccatcaacatgtgggagaaggatatgaacagacacttctcaaaagaagacatttatgcagccaaaaaacacatgaaaaaatgctcatcatcactggccatcagagaaatgcaaatcaaaaccacaatgagataccatctcacaccagttagaatggcgatcattcaaaagtcaggaaacaacaggtgctggagaggatgttgagaaataggaacacttttacactgttggtgggactgtaaactagttcaaccattgtggaagtcagtgtggcaattcctcagggatctagaactagaaataccatttgacccagccatcccattacagggtatatacccaaaggattataagtcatgctgctataaagacacatgcacacatatgtttactgcggcattattcccaatagcaaagacttggaaccaacccaaatgtccaataatgatagactggattaagaaaaagtggcacatatacactatggaatactatgcagccataaaaaatgatgagttcatgtcctttgttgggacatggatgaagctggaaaccattattctcagcaaagtaccacaaagacaaaaaatcaaacatcgcttgttctcactcataggtaggaattgaccagtgagaacacatggacacaggaaagggaccatcacacactggggactgttgtggggtggagggaggggggagggatagcattaggagatatacctaatgctaaatacgagttaatgggtgcaacacagcaacatggcacatgtatacatatgtaacaaacctgcacattgtgcacatgtaccctaaaacttaaagtataataataaaatgaaataaaaaaagaaatgtagtatatatatgagatggtatatatatgagatctcatatatatatatgtgaggtatatgtgtgtgtgtgtatatatatatacacatatatatatagtgaaatattattcagcctttagaaaaagaaagtcttgccatttgcaaccataaggatgaactttggggatattatggacattatcctaagtgaagtaagccaaatagtgcataatatttttatgtgtggaatctaaaataaagaactcatagcaacaaagaataaaatgagtagaatggtggttaccaggggttgggcagttgagatattgattaatgggtgtaaatcttcagctataagatgaataagtactagatagctaatatacagcatggtgactatagttaataatgtgttgtatacttaaaatttgttaggagagtagatatcacattttctcaccacagaaaggtaattatgttatgtagtgaatatgctaatttccctgattataataatcatttcacaatgtagacatatatcatagcatcacattgtgcaccctaaatatatgaaatttttattcatcaatcacacctcaataaagctgaaaaaaagttttttgtttttttttttaaagcaggcaggggaaggctcagcaggctctaacttcatcacatgatccaaaacagtgtcaggtggcactctaatttcaaagaaaactcaggtagctttctgtactttagagtaacattttatattttattttttatatatttttatattttattattttatattttttatattgctatataaaacttttgtttccctttctttcaagtagaagtttcatatgtttacacctcttggctcaactgcttataataagtaaaacattaatgaatcatatttctaaacataaagactaaacccataaaacttcaggcggaaaattttgaaaaatgccttccacagcttggttgtgcagtgacttcttgaaaagcatgcaaatgcactaaccaaaaaagatcacaaattggtaaatttggcttcatcacatttaaaaattcctggtaattaaaatacacttttaaaaggtgaaaagcaaaccacaggctggacaaaatattttccgtatttatattagacaaaaaaaatttcaagaatagctaaagaaatataaatcaataaggaaagacatacagcctaatttttaagaaaaagaaaaagactggaacaaatatttaacaagaaaatatctaaatgactaataagcctatgaaaaggtattcaaatattttacttatcaggaaaatgcaaattaaaacatatcgaggagcagctgaaaaagagataatactacttgtttgcaaagatgtggagcaactggaaatatcatgggttgcttgttgggagtttaaaatggaaacaatgctttgaaaacctgtattgcagtttctaacaaagaaaaatatatatgtaccctatattccaaggaaagctagccatttgacttttatgtattactccagagaaatgaaacaaaaatatatctgcaaaaagacagtattagtatgttttcacactgctgacaaagacatacccaagactgggcaatttacaaaagaaagatatttaagggacttatagttccacatggctagggaggtctcacaatcatggcagaaggcaaggaggagcaagtcatgttttccattgatggtggcagtcaaagagagagctgtgcaaggaaactcccatttttaaagccatcagatctcatgagactcgttaactatgaggggaacagtgcaggaaaaacccaaccccataattcaatcacctcccaccaggttcttcccgtcatacatgggaattgtgggagttacacttcaagatgagatttcagtggggacacagtgaaaccatatcattccaccccagacccctcccaaatctcatgtcctcacatttcaaaatcaatcatgccttaccaacagtcccccaaaatcttaattcagcattaactcaaaagtccacagtccaaagtctcatctaagacaaggcaagtcccttccacctataagcctgtaaaatctaaagcaagttagttacttcctacagacattgggtaaatacagccattcccaatgggagaaattgctcaaaacaaaggggttacaagccccatgcaagtccaaaatccagcagggcagtcaaatcttaaagctccaaaatgatatcctttgactccatgtctcacatccaggtcaggcttatgcaagaggtgggttcccattatcttgggcagctcggcccctctgggtttgcaggatgcagcctccctccaagctgctttcacaggctggtattgaatacctgtggcatttccaggcacatggtgcaagccgtcagtggatataacattctggggtctggaggacagtggccctcttctcatagctccactaggtggtgtcccagtaaggactctgtgtggaggctccatccacatttcccttctgcactgccctaccagaggttctccataagaaccctgcctctgcagcaaacttctgccaggacatccaggcatttccatacatcctttaaaatctaggcagaagggacttgccttgtttcagatgagatgttgaactgtgggcttttgagttaatgctgaaatgagttaagactgtgggggactattgggaaggcataattggttttggaatgtgaggacatgagatttgggtggtgacacagccaaactatatcaaagtagtacataaaacaatctgtgttatctttatacaattgatagtagacaactataaaaatgaacaaactgagaccaccctgaccaacatggagaaacactgtctctactaaaaatataaaattagccaagcttggtggaacatgcctgtaatcccagctaaatggaagactgagacaggagaatcacttgaatccgggaggcagaggttgtggtgagctgagattgcgccattgcactccagcctgggcaaaaagagtgaaactccatcaaagaaagaaagagagagagagagagaaggagagaaggagggaaatattatgaaaaaaagtgagacagagaaaaccatacagaccagagtgaaacgcagttaaagctaatccgtggtggtagaggtcagaatatagataccttgaagactggctggttaaggaacccaaggaaaccttttgaatgtttcttgacatggttgcagattacatgagtatatacataagtaaaaattcattatgcattttatcgtatgtaaactacacctcagtttaattgaaaaatagatcttatatatcttttattatgtttattgacttgatttgttaacaaaagggtgtgttaagattctcatcattgagaatctcatgattgggaattaaaggtctgtttctttccatttctccttgtgatttctgcagcttttacttctgtattttgatgccaaattacttggtgcatagaaattcctatagtttcctcttcacagtagaggactatcagcataatgatgcataatgatgataaagcagccttttctgtccaatttaaatattttttaaaaatttgcctgacgttcattctttggctctagctttgtttttacttccaatttacaaaatatatcttttcccttctttaaaaaaacttcatagtaaattatgcataaagcttaccatcatatcatttttaagtgtacagtttactggtgttaagtacattcatgtccatcactgccactgatctccagaactctcttcatcttgcaaaagtgaaactctatacctcattcctccctccatttatgccacgtcaaaccaccattctattttctgtctgtatgaatttgactattctaggtatcttatataagataccttatataaggtaccttatatcttatataatatcatctatattatataagtggtatcttatataagattccacttatgtggaatcatatagtatttgtccttttgtgactggcttaattcacatagcataatgttctcaaggttctttcatgttgtatcacgtgtcagaatttccttcctttaaaaggccgagtaattttccattatttgtatgccacattttgatgatttactcatctgtcaatgaacagttgagttgcttccacttcttgactatttaaatgctgctgctaagaacatatgtgtatgaagatctcttaaagtctcttctttcaattcttttgggtatatacccagaaatagaaatgctggatcctatggtaattctattcttgatttgttaagaatatgccatactgttttccacaagcactgtaccattctgcattctcaccaacaatgcacaagaattccaacttctctacatctctgcaaatacttgttattttccatttttttacagtttccatccttaagggtgtgaggtggtatctcatcgtacttttgatttgcatttccttagtaattagtaatgttgagcatcttttcatatgcttattggacatttgtgtatcctctctggagaaatgtcctttcaagttcattgcccatttttgaatcaggttgtttgtttttaatgtcgggttttaggcatcctttatagtatgaatattctccacttattttatatctacttatagatattttctcccattccatgggttggctttttgctctgttgattgcatcctttgatgcccagaagttttaaattttgatgtagtcctattatctatttttttttttttttttcaaaagaatgcattgccacatccaatgttttaaagattttctcattttttcttgtgagttttatagttttagatgatacatttaggtctttgatctcttatattttctcttgcaatcttttctaatcatttagtttcaagtgtgttggggtttggtttggttttatcttgagagttatttttcgtttcaattaatttatttttttaaatttactaggatgaaaggcatgtgaactttcatgtatattacttcgttttactttttttgtgtttttttgcttctctgattattctgcctttttccggcttttggatgctgcaggcatgtaataagtcataagaaatgaatgatgtggacattatgattctgctcacatatatttaagaaagctgtctattgcctctgtattgaacaatagctttaatagatttctttgggtgaatttttttcctttgtattgaacagtagctttactagatttctttgggtgaatttttttcctttgtattgaacaatagctttactagatttctttgggtgaactttttttccctcaaagcctaacatattattttaatgtcttctagtgtaaactatttttggagattaaggaatccagtctggaagctttaacctttacagacaacctttttatttctaggattgctatatcctttctatatttctcaaactaaagtagctttgttatcttttattttttttctctgtcacccaggctggaatacagtggtgtgatctcagttcactgcagccttgacctcctgggctcaagcaatcctcctacctcagcctcctgagtagctgagactacaagtgcatgccaccaagcctggctaatttgtttgttttgattggtagagatgaggtctcactacatttcccagtctggtctcaaactcttgtactaaagtgatcctcccaccttgccctcccaaagtgttaggattacaggtgtgagccactgcctctggtctaaagtaacttttcaacctatgtcttggtgtagatcttttaaaaaatgaattgcttattaatacattcctgtaataattataatacaagtaatagtgtgttgagcaggcatattgataggaaataaagataaaattaagcaaaaaagacactccctaccttaatggagtttacagccaagtgaagaagaaagatattcattaaactattccacaaataaatgtcatatgaaaacttaaagctttaataagaggatgaaacaactctggaaaatcagaaaagaatgaatgggaatcaactcactgatgtgcgatgatggaggatgctgagggctttaggctgcagcaacttacttaataagttcccaagcaggagagaacttggcttctacagggaattaaaaagtttgccagaacaagttggtctggagacacaggcagctcagagtcttattggtcatgctaaggagatctgagtcttagttacatgaacaatcaaaaactcctgaagagttctaattctgttgacaaattatcagatttgtcttctgaaaggaacactctgacagtcttgtggaaaagaaattggaaatgctgtggtaaatgcgggttacctgttagtataataatacctgtacagtagcccaggaagagagagagatagcatagacaaatggctgtggcaatagagagtggggagtgatttgaaacataattaggaaatgaaattaagagacatcagtgttgaaatgacagaggaaaacagggttcacaaaagtggtaccacttaaagatagaatgctggaagaggaccagttttttgggataggagaatatgtatttggttttggacacattgcattgcatacatttatttatcaagtcattccacaagaatgtactgattgtcttctgtgtgtcaggcattgttgcaggctctggggattcagcaatacataatttgatgatcgaatttgatgtatcttcacaacatccaagaggaactatcagataggcctttggacatatttggtctggacctcagaatgtaggtgtgaattctgagttgcaactatacatgtatgtgtcatttgtgtgtaggtgacaattgaagcttggggcaaagatgagatgctctgattcttagattctaaggtgagatcaataaataagaagaaaaaaaggagtcatctctgggactacaccttgagaatctcaagttttaatggatggcttaggaattactcaagttaggaggcagaaagagccagcagagaagtaggaggaaaacaggaaagagctgtgacccagagtaaagggccatagaggtcagctgtatcagatgtgaccaagagctcaagtccaagaaggtctgaataataacccttgtgatggggaggttatgactgacccccaggggctatttcattgaaataatgggatcagcggacagtttggagatggtggggtgtgactgggaaataagaaagttggaatagcaagtatggaggcctcttcccagagaggaagaggtggcatggcctctggagccagacaatccaagtttaaatcctgatgctgccatatgttagctgggagaccttgggcagatcagcctctgagactcgattgtctcatgagtaataacatgacaacctaggacctgctcagggagtgatggtgaggattgtacgagataatacatgcaaagtgcttaaagcaatgtctatcttgcaaagcttgatgaatgttagctgctagtactagttatgtgtgggttcaaagaaggcttgtaagtctttctcttcctttcttctccttccccatcctcttctccttttccttctccttcttttccatctcctgtttctttctttcttcatctttgtgttcttcctgtttctattttttctccctctttctattttttctccctctttctatttgttctcctcctcttcttctctcccttcctccctctcctccttcacttttcctcttctttctcctcctcttccttctcctcatacctgagcattagtttccacattttgttttttagtaattctaggaaatctgacctatgttttactggaataggttatttgggaagtgctaatgatttttcaaacacacacacatttaagtagacttttttttttaacagagaggcaacaagccaagtagcaaagatataagcaacaatcaaatggagcctgaaatatgataagagcatacatgcactttaacaataattttgatactggaatgattatttcagaagcaatattttttctgaaaagcattggtcttctgtacagaaaaataaaaaagtgagctgccactcatagtgaattaagagctgtgggctgaaagggtctcttttatagccagtttgaaatttttcatataataaaaacagtatgtaaatattatatatatatacacacatacatatatatgcatatatgtacatatttctgccattactttacttttattcatttaacaaatgtttcctaagctggaatcttgcagagattttgtaacagtatggagagtaggtctcagagaagagcattcctttcatgatgtggctgcatgggagaagagttcatgggcagaggctcagagccataattaggcacctcgcaggaagcttctgctgtatggcaggtggaaggggctgcttcctccagaaagagcccagggaggctgtgcagacagtggtctttgatccaggacttagaagatgagttctctggtcaggaagagacaatgaaaacccttggcatccggaatttggggaataggcaaggactcatgcagccagcaagtacagttcgtgaaggagcaggagctattctcaatctcagttcattctaacagccattcctgtctgagcaggttatgatgctttgtaaccactcttctgtatcccctgagagtttcatttatattttcactaccatgcatttttagatataatatcagtataagtttaacaatcatattttggctacaggccaaaacagtgcttataaacagttttataaaataagaagaaccttcctgtattcttcaaagtactaaacctgtgacttttttttcttttttctttttttgagacagggtgtcactctatcatccagtatggagtccagtggcgcaatcatggctcactgtagccttgacctcccaggctcaggagatcctcccacctcagcccccgggtagttgggattataggcgagcatcaacgtgtccagcaattttttttttgtatttttgtagagacaagttctcgtcatgttgcccaggcttgtctcaaacttgtgggctaaggtgatcctcctgcttcggactcccaaagcattgagattacagaggacagccactgagcctggccctacacctgtcttaatctcatttcagaaactctactgcctaaagcagatgtcaaaactcttcagcagaagcaatggttgtgataaagttttagagtagagagtcactaagcttgaaaaacaatagcaggttatatgaacttttgaagaaattagccgtttatttttttcaaggagagaagtagccaagaagctgaaaaaatatgaaagctatattgcccactccattgcaatttccaaattcccttctgggtataagccctctcagaggataactggaaaggccatatactcagtgcatgtaaagaactctggcttgtttttcattgcatcaggaatgaaagaaagacattatcggccagtgtgcagggttttctggggagaagctgagctgaagtgacttagcatgctttatgttgcctgattaatgtcaagcgagggggccactgagtgaaagttcatagcaatgccattttctgtaattgaaaatgctatgcaaaaaataaaatatgtcaacagttcctgctgcctgcctcatatcctggagagctgtgtacattttaagttatccctgcaacttaaaagaattgtaaccacagagattgtgaggggagcagctggtttgcaaagttgcttggggtaaacctgtcagagctcatgagtaaacacaatctgaaaacagaggctgctcgtggggaaatcagttgctttttcaacaaaataaaaggaagagttttgctcagggcaatgtgacgatgacgtgcaactgttctgcattaactacaacttttttttttgctttctcattgcccagttcccctttattctacagcaagaaattgaggttgtatattgcacactgggaatatctaaactggaaataattaaaatatatatttcatttatagtgggtcttatgtgaggagaagtaaagattgccacagcttcctgagtatatgagttaatgatgtgttctgcattttcttgattttccacattttaactgcctctgttcctcatttgggggtagggaactttgagaggcatggaatacagacttgcatgagcagaaacgtacagcttttgagcatgtgaggggatggcgtggagaaggttgggttcatcatgtggtttcttggcactatttttctccagtttctcccttcagtgtcaaagcaagcatgttatcaagaatgtttcaaaccagaaattggtttaagaccattgcagtatcctattaggttgtgtttttagaatatgatgaacaaatggatcttcaaaatgaagttccaaaaatgacagttaaaaaaggaatacagactcattgaaggaaaaaacctacaaaagactctgtgtgtgtgtgtgtgtgtgtgtgtgtatgtgtgtgtgtgtatgcatgtgtgggtgtgtgtgtgtgttgtaagtacattcaatatatatccatactgaatgaagtcattggtaaagtaaagcaaaattcccgttcttcagacttaattaggacatcattttgatggaggctaagttagcaaaaacacagctagaaactgggtacaaagggcaaattgattgtaaatcttggagattgtttgtatgactgggttgcatgactgaagcttaaaaagtaaaaagtgtcttacatagaattgcgagtgtgcttttggtcatggctagctataaagggaagaaatatgaaagtcattctcaaaatgtttggagatagaaactctgtgggggtaaatccaaggggtcagaatgcattcttatttattgtgtgagttttcaaattgtgaagaaatattatttctagaatgagttcaaagttgactcaaagtgataactaaaggcaatgaattgagaaataaaagtgtgaaagacatgaaacattttatccgtttaatccccataaaaactcaatgaaaaaatgaaaaagtgtcttcctcaatagcaattcacagcctctggctcagagctgggacatgtggaaggaatacagacatgctctcccaaattgcttggcatccttggactagacagtagatttctctgaagttacatcccaacattacaatcatccaaaatcacgtgaatatggtgatccatctcattgaatggaatctggatttattatgccagccagaaaactagaaaagaaaattctgatggttgagtaaagaagaggaacaaatagcaagagggatgaattgggttctgtcaggttggaaaccccccagaaacagaccctgcaacaagcagcttatcaagaggcgatccaagaagtggtgtgagggagcggaggggaaaggcaaggcaggagtggaggtccatagataattcttttgtgggcaactggggcctgatctttctggacaccctgggaaactgtagaaagcatttcagatttgcccccacccaagggacaaagaagctggagtgcttctacctaacatcctgttactgcttaaagtttgctctgagggtatccatgtctggaagcctctatgcttcagacttgcccaagagagcaaattctccttctctatccagagaaagcctgcaggaaggcagtcacagggatttgcagtaaagccaagtgtgtgtacagaatcaatgttcaaagctatgtagatgggatggactgtattttctattaggactccactgccattggtaacacaatttttccaaagaagacataagtcaggaggaacaaatgtcatctcccccaggcctcccacctgccatctccactgctaacagaatgttcgtgtaggaaaatattgttactcctcttaattggtgagagcaaccctcccatgatgaatgaaataactatggctatctgtggtctgttggcttaggttgagggtagtggtagtgaggcgaagatacagtttgaatgttcatgtaaatctatcgtgacttttccatcccaggaacagaataatgtacaactaatgtgactccttcatcttgtagttgtacattatttattgtttttgagaagtgccaaacaacagcatagaatatgtgtataaaaatgttaacatatctagtaaaaataggttcaaaaataacatcctgtatgatgcattccttaccaatggtgaatcaaacatcagctttgttaatagacaactcatttttattatttttataaccaaaagcaattctttacaatatcctttgcccatgcttccttagtaggaagaaaaagagaaggaaaataatggctagtaagtggataatagcaagttagaggatcctttgcaatcctggctggctctgtcctgtgcgccttctttccttatccttaaaggtttgtgaacttcttgtcaccagcagacaattgagattcaaacatatgtcagtgtcattctgaacgaaaaatggaagtgtgatccttaagaaaaatggctctgcatattatcatagcttcttagatttggaaaataaccctggtgtctggaaaaaattgagagaatcttactttcaggttaaatgccatatccctttcaactccaaatacattagtatttctaaagtaagaataaatgattctgagactccgttagtgaaaactaagtgtgatttcctgatccaacaaggctaacttacattgtactaacacagtgagaagtaataatctcccactcagtagcctatcttgtcaacagattgcttctaatccagagctctccttaaacctccccttattttcacctaggcaacagggcataggaagcagaattggcaggagggggtgttcccaaggagtcaggggtttgccttctgcacaggtgcttgtgctcacttagatcctgccagccttacctggatggtgctaccactcttcttggtgcagagccaaggactgaaccatcatcactgtcaatggacatttcctgtgattctcattcattttgaagtatttgaaaaagcccaatccctgactgccaggaaagaaaacgtgaactgacatgtaactagccctgtctggcacccaccactttacttattaggtggcatctggtccctatacccacgttttggtgtcagtttcttcatctttatgaatgatctgaggctgggagagggttggccccaggtctcactcattgaagagatttgaatccaggcgcatctcattccaacacccatatttatccagtgcattctctagggcaagatatttcccttacatgttttcctcttaactgcttaaaaagttcttttggcacagtattcctgtattctagtaacaaactacaatgttatgtgtcagtattcctattccataaataagaacctggaggatgtgaaataagtgatgtgtaaatgcgtgaaagatagcagcactgggctccaaactctagactatagaggaaaaagacctgtttacaccactttcccaactttacacccaaatgccagtgagtgaggcagtcaggttccctgccatgcagagtgagattctgtgggattccctgtcttatacatacactgtgctagatttgaggtggccacagagtctttgctcctccattcattgaagggtggagtcttactccccatccctccttgaacctgggcttgaccaatagaagacaatgggtttggtgctttgcaacctctgctcctggtcctgagaggtcttgcagcctccttctgggtgctggcaactctttcttggaaagttcaccctggtgcaagccggcaactatgaacaaaggtaaacaattctcagaccaccacgctgtgagaagcccaaatgtagggaagggtatcagacatgagagtgaagaaattaccctggaagttggtcctctagccccagccaccctggtggatcagaaagaaaccgcccaacccagaaaaccataagaaaaataaatggttatcagaagtcactaacttctgaggtggtttgttacagggcaagaaattactgggacatatattctgtgttcaaaaacaattttgagcaaaaccaaacttagggacacctgtgtccactaccaccccttcccacctgtagttcagcacactggcgtccttacttaacatgacatgatccagccaaggctggatggttggggcactagtgagaaacaaatccatcttccacccccattagtatctgtgccctcccacttgtaaactcaggattttgctcactattagaacttagaggaggtcccagacaccagatgctatgacagtaccacagaaaagcatcaaataaatggcttaaataaattatctgtcactcaaggaaatactcttaccatctgcagaggtaagaactcctggtctcacctctgcatgtcaaaaactccaaagagctacaagaagaaaaccttgaaactcatgttctcccaatgttcagtcttcttctcaacacaaggcatatcagattggaagctgacccctgtgtcctgacaccatggattctataaacttgctgaatgactgatggagactgatgccatcttcctaaaaaatgagccattgtggtccttagcagtgggcaataaaaaggagagctatctactgcattaataagtgagccaaggcccgattttgagatatactcttttcaaaagctttcccatgataatgaggacataccatggttataagactgaggaatgttatttggtttaattcctgatattatttgtgattcagcaatggggctggtcacactgtatatagatttcagattatttggctttccacattcagcagcactaggctagtcggtacccacattctggctttttattaggttctatctccctggggggtagggtatatacaaaatccattttgtctcttctgctattttggagactgctctgaaaatgtttttcatggttttgcatgactcttgggatcacgatttgcatcttaaaaaaaggagtcatggaaaatattgcaagatatgcatttggtggagagagaatgcttttcagcttgaagctatttgggggtctgatgatctgatgatctttctgttgtcggagctttgagcaggcacatgctgtagagatgctcatgtgtcactggggagctggtttctgatgcgactgggacttatagatatttgataagtcatcttttccttctgatactgccgtcaattcagtgaattgaatacatacagagtctatggtaggagagcaaaagatcaaaaggcccactatgttacctccccacactgtctattttttagatatgttggggccagaccaaatgatcagctgcagaataccaaacaggattgtttgaaccaagaaaataagagtttgggggccatttgtgatttgcttcactggaatacgtttctatgggtcaatattggcatcaagaagctggaagactagtaaattgtcatggtgctgtggaagtaagaggatgtggcctgactacttgctgctacaaggagatatatgagggtgaaactcatgataactgtggcctttaaatggcaacatctctgttagtaaagggaatagttctactcactcagtttattttcaaggcctttgtaactagaggcagaattaaaacttaggactgaattctagtgctttaaatatttcaacaatcacattaaatcatatttaatcatattacccaactctgtaaataataacacaaattgtatttaaaacactgtagggcagtgtattagccttctccagaaaaatagaagtgataggatacgcatagatgtataataggatatttattatgggaattgacttacacaattatggaggctaagaagcatgctggagaactggaaaagtcagtggtataattcagtccaggcctgaagacctgagaaccagaagctctgattccaagggcaggagaagatagatgtcccagctcaagaagagagagagagagagttcaccttcctccatctttttgttctgttcaggccctcgatggattggatgctgtccacccacacttgtgagggcagatattctttactcagtccagtgattcaaatgctaatcacttccagaaacctcctcacagacatactcagacacactgtttcaccagatagcttggcattccttagcccagtcaagttgacacataggattcaccatcccaggcaggcatggaggtgtgccacttggatctcccatcagaaaggaactcgctgttaggagtgctgatagcaggcagaccccagctgtggagctttgggggtcttccatagcaaatcactgaaatctcacatttttcaggtggcccctggtcaaggatgaagcatgaaggacccatctgacacacactgaataaggtagagcatgcttttttttttttttttttgaggtggagtcttgctcagtcacccaggctggagtacagcggcgcgatctcggctcactgcaagctccgcctcccaggttcacactattctcctgcctcagcttcccgagtagctgggactacaggtgcccgccaccatgcctggctaatttttttatttttttagtagagacggggtttcaccgtgttagccaggatggtctcgatctcctgacctcgtgatccacccgcctcggcctcccaaagtgctgggattacaggcttgagccaccgcgcctggcagaataaggtaaagcaatgttttttccacctctggcttggtgcttaatctcctatcacagagctaccagctgaaaggccaggagaactgcagagcaactggcaaagctggcgagccattgtttgctgcatctgagagccagcaagtagacctctttgctgattcgttctaactccctaatctcgaaagctactaggtttcccaaagtttattttgcgtttaaagtattatgaggattatctgttgggctttccatagttgaataactaaaaaactatcaaataataatactgctaaatcaaatggcccaagctccaagtggaactcacatgaaaatatttttaccgtaaattctattacaaaagagtttcaccatggaaggatttattaatcatgtgatgaggtttttagaccgcaaaagtcaagcatcacttttgaatatatttttgctatctttagaactcagtgacaaaatctgatgtctgagaaacctagcagccaccatgcctggctctaaggaagggcatgcatggttagtccttatgctccatcatgcagctgctctctcgaaggaaaaaatgagacctcagggtttaagaaagcccaacatcgaacacagtgcatcagcacccattactttgaattatgaaacagccacccctggaaattctaaggcaatatatctacatgttttgttgagttgatcatcaaatcaacgaataagatttctgatgtgttggactctgtagttatccaaatgttgattattgtaagggggttgattgtgtcttggtagcctttttagcatccaggaaaccacactgtctgttaaaataggtagaaaaaaaaagagagttaggtgtatatgatataatatttataaaagtacaacatttgcaaaggccttgatcatatgaatcctcacttgttccaagtgtattgttgggaaagttattttgaactgatgaacagttgtggatgttaaaatgtggttttatttctaaaatttgcatgtaataccacaaactagtgggtaaaatgtttttttttcaaaactagatgaaaataaaagctctgaagtaaaaattatgcctccttctagctgtgtgatcctagacaagttaattagtctctctaaacctctcttcactcttctataaaaatggtggctctggtattctagacatcatggtggtgataattgtatcatcattatcaccagcattatagttataaaaatatattatgaaagttcaaaaatcacttgaagccttatttaccgtatgcttttattaaatttttttaaactgcaagtacaagaaactctaacccggtcaagtcataatggttatcataaattctgaatccgtgggattcatttaataagtgaaggagctactttgagaacctttaagatgatggttaaatttatttgaagtatttactgttgcttttgctatataattgtgattaaagatatgtttctcagatatttctgaagtaaacacagttagctccatccagttagccccctgcacaaatctcaagtgcattaataaatccactagtaagtgatttttttaattctgagaaaaaatgttgaagatcacattgaaatagagccagatggtcagatatgacttttcacagtaggtgaatgctcataatttacttcatactaaaacaaccacaaaagcagaaatcatggtgaatggcttccaagaacatcaaatccaaataatctcaggggttttatgttctgtcaaacatttcatcaaatggcatgcgaaatatatctttcatgtccttttcatttttaaaacgcctatattctttacattagaggaaagaacttttgatatgtgttttaaattaccacatataataacattcttctctagaaatgtattgtttccctgcttaatccaatgcaagagtttttgtttgtttgtttgtttatataagcacagctgatccatttaattctctttcagataaaacttttaaaattcaaagtcattctcttctaccttaaataaaacaaataaatagttatgatttcaagcacacaggatatttctgctcttttctactggatggaatgaaaaaaatgatgaataggtaatatatagtagtcaagatgataactaatctgatttcaaaaaagaaatgtgggcttgagtagtgaaagaattgggaaatgtgttatctaaatatgtcatgggatatattgactttaatctgtaacatatgcgaagtttaatcattaagcaatgaattccttttctgaggtccgtatggtgaatatcaatgaatataatattttttgaactgaatgaaatgcccaagcccaatctctcaagatttaattacccacttaaaagtccctagagttcttgaaagaagccctgagacccatagatcataatccttgatggaagctgtgcactggaaggcaagcagaggcaagaccagtaccttctaaacagtacctgtttagaattttaaagtgggtaaccatacatatggagacctcacccccatccccacttattggagccctctgtatagaccacaaacccaaggttccttaccttctggcaataataataactgcataagagaataacatgcacttccaattacagaatgtttgcaatatcctaggcaccatgtgagatacttaacatgaactagctctaatttccacataattcagtcaattaatcatttattcattcttttaatgagtttttattgcacatctactacaagccagaccctggccgagtttgtggtggtgaacaagtctcacagaaatgatgctgtggcacagtgaggagatggcagcagacacatgcggaaatccacagggatcacgcagtgaggctggtgtcccagcagaatgagctttgtcatgtcacagacagaagtggaggtcgggggtggtggctgtgttacactgaaatgagaggaaagacttttcaaaggaaatgcccttgaagctgaggctggaaggacacggaggagctgcccagagggaacagccagtgctatttcatgatgggacagagcatggcaggtatgagcaagagaaagaggccagtgtggctggagcgtaatgcaagaaagagagtgtgacaaggtgcagctgagcaggtgggaggggtggcatcaaacggggcctaggatttacgatgtgacttgcagaacaataggaagcaccaaagattgaaagcctagtagtgacatgagtttatgatgtttaaggattcttccacctgcaattcaaggtggattggggggtcagatggggcaatagtgggtgagattttaattaggaagctcctgtaacccagccaataaggatggcagcattagctatgggatgaccatggagagggaagacgatgaaagatttgaatgttgaactaacgtgactggtcagtgaagtcaacattggagatgagagaataaagggttttggccttagcaacctggtcagcaaagagaccatgagtaagatgggaaaggaattttatggaggaagttcaggagatttatttttagatatgttcattttgaaaatcatttggacaaccaggctgaggtttcaagcaggcagattaaatacaggtctatgattccttattcacaattcaagaatccataaatgtccaagaagtgaaaattatttaaatacctcttttgacagcaaaatataacctgaaacaatatgaggctcttgacagtcatagtttagccccctgggaatgtccatatgttcacagcagagtttttgatgtgtttgattgtggggtgataccgcagaccccactgagggtataacacacaccaggtgacttcactaaaatccccacggtgaaacacatttgcggcccttttccctgcccctggattttgctaaggatctggggggttctgtggaagtctgaaggtcagtggacaggacgggtttggagatgcgcatttggaaactgtacccctcaagtgacaaggaaatgagtgtggatttaagaagataatgaccgttctctgaagttttaatggaatttttaagcaagaaaacccttaccctgtgaaaacttcagtctgcacagaagaattggtgggagaaggaagactttgcctaagatcactttatatagcacaacccagaccggggagaaggcagagttatgcccagcatatagccttggcagcatatagacttggcaggagaaagcctatctgcagattccatgatcctgggtttatacttcagcctagccctttgaccaaggttttcaggaactgagtttttttgaaatatggttattaattttggcttagaaatcattttattttattaatgcttttttatttattaagacgggcataaatttttccatgacactcagagtataaaaatgccacagtttgctatttttcaaaaaatgtcaaattaaacacagcttgagctcccactcaccagcctaggtaagaaacccaggatctgtaaatttggtggagacctcctcctccatcctgtcccccagtcccagagcacctagctcagacccccacagttccttggagggtggccaggtcctctattttcacctgtggtgacccatgctgctgaggatgctgcacctccattgtccatgtgcccctagggggatggggtttcaccactcaggctacagggttggagtcagatctgatcttctgcatacatggaacatcccttctatccagggtcattatcccagggtgttgttctcactagtctttgaccattaaagcccccagtctacctccacacttcttccctggacagtccttcaattacttgcaggcgagacaggagcttatgccctttcaggtaagtccatagcagcaacataaatacaagacgctagcaagttcttaagtcatcctccctcctacagactaaagagagcaggcaaacaaccaaacaaataaaaaatcctacaacgatcttcttcattgatgtcctctcaaagtacaaaaatataaaatgcttgggataattaagatgcaaagagagggagagaacaaagtttgagaaaggaaaatgttatggagtaagtatgatttttagtttggttttacaacattccagatgttttcctatttgctcaaagtgatagtatgcagtcctcaaagtctaatctaatttatgtctctaaactggcacccaatgagacattttggggaaagattgaaataatttgctaagtcagacacaccatcgtaagtggcattttgtttttgaacagaatgctttttctccccagtaattaaactattatgtattaatttacaacaatttgaaaatacagaaaatgttataaaggacaaaattaatattgcccatgattttattacagaaataaccattttgtattttccttccggtttttgtctctaaatgctggctccgtatctatgtatttacattttttacatagctgaggtattaaaatatattctagtttgtgttctgcttttctttcaatattttcagattgtcgtgtttcactctcaagaaatatgcttaatatttctgatttcttaacataatgtgtttgaaattaaagacttgggtcaaagaacatgaacatttttatttaatttttttatttaaattttttcattgcaactttattcttataaaatatatattgtcttttataaatttggaaaatataaaaactgtgaaatgaataaaatataaatcatacatattcctgtaacctcaatacaattattgtcaggctgtgacatgtataatcacctatgattttgtacacacatatttctacttctcttattaatactactgactgttatattgtgagtattttcctataccattaaatattctttggaaacacgatcttaatggtcctcttcctctcatacatgagaggaaggcattttcccttcattggctccatttaggctgttctccaacttttccctgtctcaaacaccattgccacaaacatcctccaggctgagtctctgaactgctcctaacttaattgccctcactccaaaagtgagggcaggtaaagggacttcaggctgccctcagcacgtttgtgtcccctgagcagactacaaagcagtgttctctgggtggagggatcacaaagacacccctcctctcacacgacccattagaaaatgacctcttctttctttgggcaggcacagccttgccaagcgtacagccaggtgagcagaatgtgagcgagatttgtgggcccaccttcttggccaagtgattttgttgcagtacttcaaccttacattgctgtcatgctgtgagcttttacccagtcactgagctagtaaatgacacagctggttggcacatccaaatctggttgactcctttaactacctcaaactgctcccctgaccatgtccagaggctggcaggctgggtttctatcattctttatatgctatattcacggcatgacaccgatcatagtacatttatttcttgaaaaaaacagtcaccgcaggattatctaaacattctattcagcaattgcatgtattgtctggctttctaatttaccgaaaatttgtgatttacaaagtccaaagttatggactgtgatttaaaataataataataataataataataataataaaactgcggtctttgggattctcagaaaaatgtcccctcagccaacttaactgagccaaatgttaaaaacaacaaacatttgaacaaggctttcacattcttaatatgttaaagtgaacaaactaagtcaattactttagggatcactgctgtttttgacatcccaccaggatgttctggaattttatcctagcctagctgtagatttcctttcaaaatttggaaagcagctttctcccaaaagcagacagaggatgggataatgacagtgaagtgagaattgaagagttaatagtgtccatgttatgctctttaaagcagacctgttctgttgtgtattttggcacatggtttttagacatattttagtcaatctttgcaaagttgaaagttgattcagagccagatgttcagaaatagactgagaaggctattgtaatttttcatccctcagtttttgtacagaaacttcattgtaaaaacccttctagactgatggctgcctcattgaaaactgggtcaaaaatatggctctgttagaaaatctcttggattacaaaacaatgcctaaacaaaaacaaatagaaatggaaaccgccctacagatgtgagatttgtgccaagtcaactgtttgtgcattgtttttgcattctgcttaactttttatgttgaaataatttcagagcaaaggaacgctggaaaaatagtacaaagaatgtccacatatcttcctctcattcttccaaatgttaagattttcactcatttccttccttattctccctcctccctctctctctagtgtatatatatttaacaataagggtgttaccttagataaccatggtacaatatcaaaatgaggaaatgaatgttaacacaatacaattatttaatctacagcttgttttctaattttcctacttcaacaaagttatccaagttcttatcaccagtcctgggacaaatggaccccttgagctctgatgtgatgtcccatgagggacatcacaaggcttctgtgatgttcctgcccaaaatgcataaaccacatctactcatgaggaaccattagacaaacccagactgagacatgcgacagatgatacataactggagagtactcttcaaaagggtcaaggtggtgaattaaaacaaacaagtagcatccttaaccaaaacaaaatagagaaacttccaaataaacagagacctggcaactctgtgagtctgaattgtttatgtggataaagattaacttcatgatttaacatcattaagatgttagcatccttaatggtaatgattaatatcattaactccgtgatttaacatcataaagattaaccaagtggtttaacaactggatggagtcccagaaaatcaagccctcactaattcttaagaaaagtaactggcacttccacaaacacttccacactaccctgtctgtgacagtgcagacagctttgactagcaagtcaaccgccagtctaatgtaaacgcttagtctggttgtttgaccaatctggccaagtgggtccagcccacgtgcctgacacttagccaggatgcactgcgcaggcgtggggcaggggcggctctgtctgggcttctgagctcctcccgcaggatcctggggctgcacatggctgtaattagaaatgagaaatccgagcaaaagcatccatgggccacaccagagaacaggaagcagcgttcctccttttccacatcatagcacactgaaaatgattgcatatgtacaatacagcatccaggacattcagggacatttatataacacttggtgagatgttcatgacaagttctttatattatgtaattatgataagaaaaataaaatttgatccttttagaaaaatattaaatacaggatttatataaatcttccacgtgaaatatgtttcaggtctttttcttttgcgctctcccttttaaataagaatcttgaacttgcccctgtacctctagctgtcaggttttttgtgtgctatggtttcacggaattccgtataaaaggcagacccaggtttcgtgggtctaaatcttacatgatttggaggagaggggagactgtaagtaagagaatagaagattgcaaatataaaatcagatgcaaatatttatttagaatgagaaaagaagtcatagttagttactggaggcttggtgatatagttctctttcctctgtagtatctttaggttattatcaaaaatgcttatgtagaaagctttctgtttaaaatccagcttcttctcccaacctagaatgcaactcccagcaactctgccagcactcacacagctgttgaaagaggcatcttagaccttaaatttggttagcgccacaataattccactgttttgtagtcattgtacataagggcatttattcactcgagtagataataaaaagtagccattgttccccatctaaatatgtacatgagttgaaatattaaagtctcaaaagcattttcttttcttaatggacaagtgagctactgcaatttcttatgataataagcatagatttccagtctactctaagattttcatgtgtcaagcaaggactttgaaagaatgatgaagctttgttttgcagggtgtacatgcctagtcagagcaagcatctcatagctagtttgaatgtaaaggacactttaaccaaaaagacatctgtttctgatgtactggaggatggcgttttggggctgtcatctggagtgacactcgacaggaggtcttactgcctctgtactcctagctctgagggcctcttggggtgcccctaacaccaccacagctgcccctgagtcttgctttgctgggacagccttgccctgccggaggagatggcaggtgggtgggatgaggcttggctccaggaaggaggccacttgtcatgcggggacagccaggaagttaattccctgtgtgcctgaactgcttgtcccaaggattgctgcctcagggtcacattcaaccagccacacctcaaacagaggggacagaaatacaacacaaattaagaagctctgctgtggtagacagggcgctttgtaattgcacagggctaggtcaaaaatcgtagccttacaaaagaatcgggtagtgtcagagaattttgaaatgaaaattctaagaagtactccttgatgtagagaaaacagcaaaggagcggcaacagagtgaaagaaataaataacttcataacagagtgccacactccgctagagaaacagaaacgttattttccaacagcttcacttccttcctattttgccgtacagaaaagaacaacatgtaacttaggataagtgtgtaggggcctggacaaatcactttggtaagactgttttatcatttataaaaccagcttcacgagaatctattgcatagttgttatggggatcaaatgtgagcagttctttgtaaattacatgggaaggtttatgtttatttttctttttatgtgactatagaagatgtctggtgtttcaagttcacctataatggccacacatttttattattacaactcagttaattccagaaacaaacatctgaatcggcttagtcccttgaggagttgggatcaggaggggataaggctgtgtctccacctctgcattgtcacggtcattttcacagattgacctgaggatttagaacagccttaaagagaacaaatactaacaacaacaaaagtcacttaactgtagccttaagcaacgtgcaaaggcaagaaaatatttgtccagggggtagttgagttcttcacagattaacagcacatttaggccttgggattattttgttttattatattttgtttgtatatagcttagcactaactgagggggtcgcttttcccttttattaagctttctgggtctgatctgtctctgccctgcaggccctgccaagtcacgcacccaagataactcctcaattcaccacgcccaaggggatggcatggcgctcagctctcatttctccccacgtcagcctggatttatacagctttcctgcaggttttcccgcttcatgctgctgcatagtgttttctctaacttgccacaatttaatggccaaacctcatatttaaaatattatggatacgaaagggggaaaataaataatttccaatcatggctcactaagactttgtggccttgtcagtctgtaactgcagacgtgttgaagtcatcttgggtatttgcagtggaacctaaaaagaagtgtggttttgctttgggaaggtctctatgtgtctctcctgcttgcagttcctatgttgttttggggtctctgggtgaaggaggcctcctgagagaattctgcttagaaatctgaagctgacaatctacaatacccttcagggtcgttccttttgccaaaggggaagcagaagtgccgggactccacatttcacgaagcctttcatcgtaaatacagttctcctccttccttgtcaaggtttcgaggatctaccagtaattcagccacatttgtaattgtcatgttaaagtaatccacacatgaatatagagaacaaaaagaacgtaaaaattaaaatgtattttttaatttgagaaacatgttttatcaatacatatacacaaagatggcaattaaaaaggaaaacagacttactgtgaataaaacacaaattttgtctacatacactagaaaattttcctcagatccttggaacccgttgatatatttttatagaatagccgtgatctaatttttggcaggggtgtgttcacatgtgtgcgtatccattcttagaaatgtgtaaaatagtataccaaagttaaagtaaatagaatgaaacaatttttctctacttagtaacatttttcagtaactctcctgaaacaatttccatctgcaactttacctttaaaagttttaattattttttaaatgtcaccacttgattttgatgagtgctgttggcaatagagttagatgaccagggaacaggtttaatcaattgcaagtggcttctgtaacctttggtttggaaagtaaataggagaggagaaactcaatggcacattttcttctctttcaaacacatgttcttatttaataaattctctctcaaataaaataagcctgtagttattggtggtcagtttcatgtaataggagctactacagttttcccattaaaaaaataatacaagactgcaataaagcatatagtgagtcactttattgggtacgaagtaataaaccagtggttacaatgataacgtctatgatgtgtcttagaagaaacaaccttgattgttttgtttggtttggggtggggctttttggtttagtggcacagaaaaccaatatgggatcagaccccacccttcaaatcagtgttcttatagcaactggaaaatttcactctcagcaatgatcacaactgcaattaattattaaagtgtgtaacgtgttgctcagtatctcagtcttccaaaactatacatgctccacatccaagttctactcaggggcaaggactactcagtttatgcagttaaatcactgcatgcaggagtgaatggttggcatctatatatagaagaaagaaaaaaataaagggaataacacagaggaaagaaaatagagaaaagaaaaggggaaagagcaaaagaaaggaaggaaaaagacaaagaaggtagcaaagaaaagaaggaggccagatgtggtggctcacgcctgtaatcccagcactttgggaggctgaggtgggtggatcacttgaggtcaggggttcgagatcagcctaggcaacaaggtgaaaccccctctctactaaaatacaaaaattagctgtagtcccagctgcttgggaggctgaggtgggagaatcacttgaacccaggaggcagagcttgcggtgagccgagatcgtgccacactgcactccagcctgggcgatagagtctcacgtgagactccaaaaaaaaataaataaataaaataaataaaaagaaaagaaaagaaagataaaagaaggaagatttttattttttgggaacctaccatcttgcaattctgtcaagcacattaagtctactattaacaatatctatataaaataagtatttttaactttgctgatctttttttgttaagtaaatcacagcttccaaaactcacgatccctctgctgcaccttgctgccagcattcaacacaatattcttctatagctccccaaaatgcagagggagtgcatgagaacacagttatttcaatcgtcaactactgctgaatgctgggtgctgcagacgtaccccattcttgcacagttcacgttgctgggaacccgtgggatgacacagcccgagtatcagaagtgaaagctgaacgtcattactcctggtatcaaaaatattttgcagactacctgaatgatgttggatgcgggttctagtcccctggaagtgatattgaacatccagggaatttctcttaaagacgcaatcattcacggctagatattaaccagatctatgacatacagtgttgccacatcatcttctcatttcactggctctaaccctgctgaacatttctaatacagcaagggtgtttggtgaaatacgactttctgattgaatgaatgcctgcatgcctccgtgataaacaccagttcaagcacactgtggattacaaggagagacaagtgccaaaatctccagataagtttcaacccctttcccctcccccacaaccaaattatctcaatttatttttcatcagatcttactgtgaccaataatttttgtatagtgaacatcagtatttttgcctgccttgctctgttctctgtttttttttccatctctttgctttgacatgccaagctgcatttgactttaaggcagttttatggaagggaagttttaaagaaacattaactgtgtggtgggactgatataaaccccttggcatggactagtcagagtctatacaccttatcgctttggctgccccctcctttttattacctttttggttcctgttgctaacatatttccttttctccaagtgtatttttccagtactaaagctatgcttttttttaggtctacctagaaaattttcagttacatcatttgcacaaatatgttgatgttaacattgaaaaacctctttgcctgccattgtatattttatttggctaaaaacggttcatgtctaatacattacatgtcctttggtgatactatttaagcaagaaattccaaaactcacaaataccgaatagccaaaagttccaaagctgtgcacgaacactaaacatgcaatatatctcctccttttccaaacagaaatagatttctctctgatttgtttgataaatttgacccatgatttccatttggagttattggagttcctactgtttttctgcgtgttggtgggccaagtcctaatcaccccaaagccccacagagaccataaattatagcgatgaggtgaagctttgtattccttcggctgcagaagaaggccattttgctgcagcctattttgacaggcatgaatttaattcattgttttatgacagatgggaaaagtgtacatgctcatagtactgatttatggtcatgtgggtctggaggattctataatttgcaactaatgtgaaaacagatggataggcagacaccaaaggttaggctgacctgcgcatttctccactggttacaaatggcgtccatatgcgtccagtctctctgggtgaggtcttccttgggacggccagacattgtaaagagcggtgcacttctttttttcccctcctaagtaagttagtgaaagtgaaatttgggaaatgtttccaagtctcaatatttcaagagacaccctgtgccttctgaatgtgtgggattctactttccttttcttttttaattagaaagcacttttccaaggtgtatgtaatatgttcattattatccaaacaaggaatgccatataaaggcattggtagctgttttcacttcaattgacaaatttatttaaatagaatgattgattgaaaatcagcagctggggagtttcaaaggaaatacctcgacttgggaacgggcatgtatttttgtgagaaatgtgtttgtgcttaaataaatgagtttctactttataaccattttgccttttaagaaaataaatgggttatcatttgaaattacttaattgatgctaaagtgtttcatacattttgactattaaatgactttacctaagaggaaataacaaaaatcacatttctttttgaagaaagaaatacatctagacctatagtaacaaagtaaatccatagtcaattttacttgagttgctactcattcaagtacttaacacatgaaaaaaacatgttaagaaagtatctattttgttattatcagttcaattgtcataacattatttccatattaacttgatttataacatttaaatattaaaactaaacatgctattaattttaattctgaagataaaagttgtgtttcatttctcaaaccttcacaactctgaagttgtcttatgtttcattttattttgaaaactggaactgtggattgctattccctaaattaaaagtacaaaattcagatataattaagggctgttttactcttgatcaaatcagcattttggcaatgaaagtcagaagacctgtgttttacaaagtcaaaatattgttttattttattataatttgaaattacattttaaccagtctaatggctatttctgagccttaactgacatgaaactgtctgtattggtgcaattataatgcaggatatttgtagcttcatatgctgctgcagaggctaaacgcagaggatttagcctcctttgacactcaatcattgtacatttatcttggaaagggaaaaatgtaagtggctgataactaattttaattgacatctagaaaaaataaataaaccaagcaaaccaaatgtgttttcttaaaactatgttcttcttagctattagcctctctttagctacagaaagaaatcatgtgcatgttatttttttcacacagcacttcctaaagaagctgtaggctggggatgccatttcccttttagacaataatagctgccaccatagctgccactatctcattgctgggtcaaatgaaggtagtctcatcagaagataccaagagtcatgtgaaagccagttagatgaaaaaagcctgtatctgacctcaaagactttctcttggctcaaatgtttaattttgttaagcatgcagacaatcaatttaagaataacctgatttacaaatgtcgtttgacatcaagtgagtaccagggacttacttttattatacattttttggaagggctggactgaatttcctttatgcattcatgtcaatggtatggatagggctatttctttactccttgagcactggaaatgcaagggtgtgtccactggcccatgtgttgaggcttcatccatccctgtcatcctgtgctcaacctgctcctgcctgcacagcactttccttcttctacaggactctacttcctccccagtctcttcatttacagagtgtctggtgctagggaagggatggtgatcaagagctccaggaaccctgcttggagtattgtctccttggcagaattaacctctctcggtattcttcaagttccctttgtacatatcttctcatacaccgagtaacactgcccagcagttgattatctatgtctgtttcctttactatgaaactgacttgattacattaacattttaaatgccattacctacttgtgggtctggaacatagcagtagttcaataaaagttaattgaaagttgaatgtgtggaaagaaattgatctttaagccagctatgtaaggatagaaatcaatcagtttcagtagattatgaaataaagtaaaagtaaatccatgacatatgcagttataaaattatttcagagaagtaataactatatatgtaaataccaattctttaattttttatttttatttgtacatcaattgcatttttatttgtacaaataatgtatagaaagagcctcactggcaggacttctaacaattcaaagtcagaatcaacttccagctttctcatcccactttcttgctcagaagttaccaaatctcacagtttatgaaaatctcccatactttcttctttgtatttatgaaaacgtgttttatatataaatgaatcatcttatcttggttcacaatgctttatttttaattaaattggtagctaacacttgttatattcctgagatttttctaagcactcaacatggttagctcgtttgataatgtgataggagctgttactatggcactcttaccaatgagaaagttaaggccaggaaaaatgaatgacctgctcaaggtggtgaggtgcactgagcgcagaataccaggcagtctggatccagagcacactctattaacctctgcactctgctatattgaaaataaggccataccaaatggactactttgcaacattcttttttttttaacttaatgatatgtcttagatagttctccatggctttctatataaccataactcattaattttaattagtagctaataattcacagcatggactatcctaatttatttgacattgtcatgtgtatggacattaggctgatttcagtctttcattattaaaaattacaacaaatattcctgtatattctttgtgcaaatgttgcagtatctctaacagatacacctagaagtaaaatgatgagccaaagctcatgtacaatattaaattttaatagacgttgataaattttggtccgaaaagactgtcaactatcacttcttccaaccaacattatttattgtctttatatgaaatgttatgagtatgaaggatacaaaagagatcgttaatagttttaatttacattgccctaattatagcaggatttactttggccatttttgtattatttgtagagattctttatatattctggatagtaactccatacattgacatatgttgttaatatatatttttctattctattacttttctttaaactttgttgactcctactgtttagttgtttaaaagtttatgggaaaaatattttctatgttttttacatggcttaagaaattctttcttgccaagtggttttaattctattttttattataacataattacattgagacttgttttattttgtttgcttatttacagatagatgttatttcagaatttattaatgtacatagggtagatagaaatttttttcctactcaattctcctgtaccatttattgaataattctgtcactcactgatctgaaatgccactttatcataaacttaataaacattactttattctgataattggagtaaaattagcaaatgcaaaaacatagataagataaaagttatcagtaattgcaaccattaaactactgtttagtggtttagatgatttttctccattcatggtattattttttatggctgacatttcacccagtcttttctaatcatgtaatggcattttaatatattgttaactgttacagtaattaaaagaaaaatggaatactatgtctgatataaaaataacatagacttctaaatgacaatacacagagggcatgaagttgaagtttgattggaatatacacattactgcttgtcatagtatttatttgtgcaaatgctctaaaaattaataaaatattttaagagtattacaatgtttatattctttgatctagaagtttttttttcaaggtatgtatacaaagggaataatcagaggtataatccaagattaatatataaaatattgcacgtatattttataatacctaaaagaatgaaaacccaaaatgtccaaccatgagggtggttgaataaattagggtaccttcttgagacagaatactatttccttagtgcaatggtgctttgtagacctggcgtggcagtagctgctgctctttgacaaatgtttttggctccccaccttccgggcctgtggaaagctcatgtttcctggacaccttgtgattgggtggggctgtgggactgcctgacaatgtcatgagcagaaatgacacatgtcatttccaggccagaatgctcaaatattaaagggaaacagtccacgtttggcaaaggggccactaacattggaaatggcatggctgagtgatgataaggagtagagatcttctgctaactgtaaatggaaatatggattagagagaaacagacatgcactgttttaagccactaaacagtagccactacccattggttaatacagataagaaaactctcacaaaataaaagtgagggggaaaatagggtaaaaaatgtgtcctgaatgtatgaaatcaattttgtgtgtgaggggaaaataatgtaacaaatatacacacaaggaaaccccctcccccaaacccaccagaatattgtttttacctctgggtgttgagactatagagttttaatttctttatatattcttctgtttttctagaataaatgcatattattttataattacaaagtctactttttaactcttcataatcataacttataatggtaaaatttatataaaatttcaatctgtgcatatgtaaataaattaactttcttgttatgcatttaagttagttataggtttccactgttttcttcagacaatgattatcattgtgtgtaatttcaacctagtaactcaattgtttctgtagaattgatagtagaattaattactcaatagttatggatattttaggactacataaatgctattcaacactctttttaatggttgtatcaattacacttttatcagtaggagcactcattcttccacaaaaaatgatagtattgaattttttttcttttgttaaatttataatttgacaagaaaaatcttctaaatatattttttaaatgtaatgtgtcttcagctgtccatgggaaagcactaatattatatttgatttcaaatctattgtggactgctctggggacctactgcacatgaccaatacctacatgagctacctgtgcatcaacagcatgaatctaacatcacctgagctcatcttcatgtttaacaagacaagttcgctgatgacacctttggatcctgaggcaatgccaaattgctacaaaagatgtaaatatttacactcaatttctgtaattatgtggattgataatcaaacagttcatgcatcaatatcaggctgtggatcatacttgagtagcactgatttgtattttcttaattttaattaagtagctaatatattctcaaatgtagcttttattttgtttttggcaaattgtctcttcttgaacttggctcctttattcttagatcctatcacttgtatgagtttgacaccattaagactattttctcttttcaaatgtctacacatattatgtgtttgtggattcttttttatatctcgtctttttaatttttaaaatttttatttcaataattttttggggaaaagtggtgtttgattgcctggaaaagttgtttaatggtgatttctgagattttggtgcacccatcacccaagcggtttacgctgtacccaatgtatagtcttataaccctcactcccctcccacccttcccccagagtccccaaagtccattatatcattcttatgcctttgcatcctcatagattagctcccacttataagtgagaacatacaatgtttggttttccattcctgacttattttgtttctttttatggcagagtagtgtgtgtgcgtgtgcatgtgtgtgtgtgtatatatatatatatatatatatatatatatatatatatatctcagatatatatatatatataccatgtgatatatatcgcattttctttatccactcattgattgatgggcatttaggctggtttcatacttttgcaattgcaaattgcaaaatactgctataaacatgtgtgtgcaagtgtctttctcacataatgacttccattcctcagggtagatacccagtagtaggattgctggatcaaatggtagctctacttttagttattaaggaatcttattactcttttccatagtggtagtattaatactattttatatccccaccagcatgtgaaaatgttcccttttcaccacatccatgccaacatctgttacttttttattttaaaactatggccattcttgtaggagtaaggtggttttgatttgcatttccttgataattagtgatattgagcattttttcatatgtgtgctggtcatttgtatatcttcttatgaaaattgtctagtcatgtccttagctcactttttgatgggattatttgtttttttctcttgctgatttgtttgagttccttgtagattaaaggtattagtccttcatcaaatgcatagtatgcggatattttctcccattccagggttgtctgttttctctgctgattaattctttggcagtgcagaatttttttagtttaattaggtcccatctatttatttttgtttttgttttattcgcttttagattcttggttatgaattctttgcctaagccaatgtctagaagagtttttctgatgttatcgtctagaatttttagggtttcaggtcttagatttaagtctttgatccatcttgagtttatttttgtgtaaggcaagaggcgaggatacagcttcattcttctacatgtggcttaccaatgagctcagcaccatttgttgtatagcatgttctgtccctgccttatgtttttgtttgctttgtcaagaatcagttgactgtaagtatttggctttatttctgagttctttattctgtcccgttagtctacatgccgatttttatacaagtactatgctgttttgttaactatagccttgtagtatagtttgaagtcaggtaatgtgatgcctccagaattgttctttttgcttagtcttgctttggctatgcaccctccttttttggttctgtatgaattttaggattattttttcttgttctatgaagaatgatgatgggattttgatggaaattgcattgaatctgtagattgcttttggcagtatggtcaatttcacaatatttgctctacccgtccatgagcaggggatgtgtttccacttgtttgtattgtctacgatttatcgatttatttcacaatgtattgtagttttccttatagagatctttcactttttgttaggtatattcctaagtattttactttattgcagttgttgtaaaagggattgagttcttgatttgattctcagctggttgttgttggtatatagcagtgctactgatttgtgtacgtttattttgtatcctgaaactttactgaattcatttatcagatctaggagctttttggatgagtctttagggttttctaggtatatggccatattatcagtgaacagtgacaatttaccttcctttttgccaatttggatgccttttatttctttctcttgtctgattactctgactaggacttccagtattatgctgcatataagtggtgaaagtgggcattcttgtcttgttccagttctcaggggaaatgcttttaacttttccccattcagtataatgttggctgtggggtttgtcatagatggctcttatttccttgaggtatgccccttctatgccaattttgctgagggttttaatcataaagcgatactggattttgtcaaatgctttttctgcatccattgagatgatcatatgattttggtttttaattctgtttatgtgatgtatcacatgtactgacttgtgtatgttaaaacttccctgcattcctgttgtgaaaccctcttgatcatggtggattatctttttgatatgctgttggattcaattagctagtataatattttgttgaggatttttgcatctagttttctttttttgttatgtccttgccaagttttggtattagggtgatactggtttcatataatgatttagggaggattccttctttctctatgttgtggaatactgtcaataggattggtaccaattcttctttgaatttccgatagaattcagctgtgaagccatctggtcctggactcttttttgttggtaatttatccatcttctctaggttttctagtttatgcgtgtaaaagtgttcatactagccttaaatggtattttgtatttctgtggtatcagttgtaatatttcccatttcatttctagttgaacttatttttggatcttctctcttcttttcttggttaatcttggtaatggtctaatcaattttgtttatcatttcaaagtagcagttttttgtttcatttatcttttatagatttttctttgtttcaattttatttagtcctgctctgatatttgctatctcttttcttctgctgggtttgggtttggtttgtacttgtttctctagttccttgtgagatgtgatcttacattttctgtattctttcaggctttttaatgtaggcatttaatgctatgaactttcttcttagcagcgtttttgctgtgtcccataggttttgttaagctgtgtcactattattgttcagtgcaaataattttttaattttctttttgatttcattgttgacccagtgattattcaggagcaggttatttaatttccaagtatttgcatggttttaagggttccttttggagtttattttaaatcttatttcactgtggtctgagagagtatttgacataatttcgattctttaaaatttattgaggcttgttttttggcctgccatatggtctaccttggagaatgttccatgtgctgatgaagagaatgtatattctgcagttgctggtagaatgttttgtaaatatctgttaagtccgtttgttctaaggtatagtttaagtccattgttgttgactttctgtcttgatgacctgtctagtcctgtcagtgcagtattgaagtcccccactgttattatgttgctgtctatctcatttcttaggtatagtaatgattgttttatgaatttgggaactcccatgttaggtacatatatatttaggattgggatattttcctctcggacttatccttttatcattatataatgttcctctttatttttttaaactgttgttgctctaaagtctgttttgtctggtataagaagagcttctcctgctggattttggtttccatttgcatggaatatctttttccacccctttaccttaagtttatgtgagttcttatgtgttaggtgagtctcttgaagacagcagatacttggttggtggatttttattttttctgttattctttatcttttaagtggagcatttaggccatttacattcaatgttagtattgagatgtgcggtactattccattcatcatgctagttcttgcctgaataccttttttttcattgtgttattgttgtataggccttgagagatttatcctttaaagaggttctattttggtgttatttcaaggtttatttcaagatttagaacacctttcagtatttcttgttttgctgggttggtagtagcgaattctctcagcatttgtttgtctgaaaaagactttatctctccttcatttatgaagcttagttttgctgtatacaaaattcttggctggcaattattttgattgaggaggctaaagttaggaccccaatcccttccagcttgtaaggtttctgctgagaaatctgtcatcaatctgatagatttttctttatagattacctgaggcttttgcctcacagctcttaagattctttcctttgtcttgactttagatagcctgaggactatatgcctgtgtgatgatctttttgcaaagaatttcccaggtgttctttgagctgcttgtatttggatgtctagatctctagcaaggccagagaagttttccttgattattccctcaaatatgttttccaaacttttagatttctctttgtcctcataaacaccaattattcttaggtttggccatttaacataatcccaaatttcttgcaggctttgttcatttttttgtttcttttttctttatctttgttatatctcatcttattatggaaagtatttgaatggtcatcttgccatcttaaaagtaaaactatggaaaatacatgtcatgcaaacagtaaccagaagagacctggagtggccataatatatcagacaaaataaattttgtattaaaacttgtcacaagaagagtgattcagcaagatagaagagtaggaggccctggctcctcctcctttcccatcattgctactaatttagcaacaattcatgaacaaattggctttgtgagaaatcataaattaattgaaagcctgctgcttccaggaaaatagtaaatcaaaagccagtagggatattgaaaacatgctgtcagcagagaccctgctcttagattagctccttacaatcagaaagagacccctaatttccatctttacccagggaagggagggtttgctgtgcatatccacagccctaacttttctgagggatctcctcaaaggactggcttttatcttgccagtcttgaagctctgattagtctgggacagtcttgcaacctgggggagaatagagacggcagcttaggctagtagacagaagtaattcttcaccctgctcaacacaaagcaagtagacaaaaactacagctgcctgctttaccttggggaagaaaagaattggcagaggccccagtctctctagctgagctaattagtgggggtcttctcctgtaggaggccagtctgtgaagaccaggagaggtgcctattttgcctaatgcacagaaaccaacatagagagtcaaggaaaatgatggatcaggcaaagattccaaacgaaagaataaagtcaaatttaagaaattgatcctaatgaaatgaagctgtatcattttcctaatagaattaaaataactcataaagatggcccactgaggtcaagaaaacaatgtgtgaacaaagtgagaatctcaacaaagagatataatatttaccctgaacagaaatattggagctaaaggacacaataattaaactgaaacaccagaggggttcaacagcagacaagatcaagcagaagaaaggatcagtgaactcgagaataggtcaccgcaaataaatcagtcagaggagcaaaaattgtttcaagaaataaaaaagaacattaaatattattaaaaaataaatccatcaagaagctataaagattataaaaatatgtgtatatgtgtatgtgcataagtgtgcatgtgtgcatatatatgtatgtgtatataactaacagagtcccaaaataactgaagcaaaaactgagagaattgaagggggcaatagaaaattcaacaattatgggtgacaattttaaatctttgctttcaataataaatagagtaatgagacagaagatcaacaaggcgctacaaaacttgaataacaatataagccaatgagacctaacagatgtctgaagaacattccaaccatcaatagcataatgtatatttttctgaagtgcatatggaacaatttccatcataatagaccatatgttaggccataaaataatctctatatatttgaaataattgaaataatacaaattattttctcaaattgcaatgggatgatattagaaataaataattgcacaaatatgtggaaattaaacaatacactcttaattgacgggtcaaaaaatatcacagtaaatattggccctaagattcttaacaaatactgggaaaccaaatctaacaccatataaaaaagattatgcagaatgaccaagtagaatttgtccaagaagtacaaagttggttcaatgtatacaaatcaatcaatattatacaataaatattacacctactatgtatccacaaaaatttacaagttgaaaaaagaaaacagaattaatacacaatattagtagaataaagcaaaaaccataagattctctcaagagatgcagaaaaggcacttgaaaaaaatctaacacctttccataatgaagatagtcaaaaacaatgtaaggaaacttcctcaatctgacaaagggcatttacaaaaaaacacaggtaacatcattcttaacaatgataacagtagttggtcaactcacctggtgtctcctgccaagtccagcagaggtggggagatggaaaagaaggggagagatgaaatcagtgagaagtacagacagccaggatgtgagcctcagccctgcctcccacttaacagtgaatttgggtaacactttaacttgctgagcttcaggattcattgctgtaaaatgggagatactgaagctctctacaagcttttgggtatgactgcattatttgaagaatgcaaagtacctgcaggtcttggcataaagttgcaataatgctattttcccttgagaagcttctaatttaattatagagaaaatatataaccagttggatcctcaatgttagcttctagttgttctttagtcctgagtttttaaaccttattagggcttatttcaacatccacagggtacctactgaatacttcaaaattacaagatatagctcttttgctattgttgcgtcaaatttcttctgggaatatacttacggttttttgcttgttttaattaagtataataccacacacaaaccagttgtgttgcatggcatcattactgttagttgaatttatttggcatctttcctctgaagaacaatgggtagagtctagaatttatcattctattcatccactcataagcatttatggctctgacaaggcaacatgccaggaactacaatctcaaagatgaatttagcaaattcagcatgggaactacaatttcaaaaagatgaattcagtaaattcagcatgggtcttgctctctaatgtatacagagagtggaaaagtcagtcatactacaatagtatgtgtcctaccagaagtggaagtatagctggccaccaggaaatatcggaaaagttgctgtcatttttcttggagaagtcagaaaaaatatctattgggaagtttatattgctgcttcatcttgaaacgtaagtaggcaatgagaagaaaatcgtaattaaggctgagagaatggcattgcatcgttgcagaggtaagaaacagcactgggactttaggaagtattttcactaggatcaagtataatttgcacaagggaaggggaaacaggagtagaaaagtaggcaggagccagagaataatatgccttgcatgccttactaagaatatggactttactccattctttggggagttatggacagataactgatatttccatccacaatcaatccagaaacacccctgttttgacaataccccagcctcctctagggggagccacctttgattttcatggcagggtgggatccagaaagctgaaagtctctttccaaacttgatttggagacatgaatttcacacaaatacaacaatactctcctatcttcatggggcagggttgggggagcaaagccgctgatctctttacagattatgaaagaagccaaagctgagatggaatcctggtggccttcctctgccccactgtgtcttaaaatgtgaatcactttggaagcatgttaagaaggaggatcatacactctttcccagactcactgaatcaagacctttgggaggtaattgaaatggacatttttctaaatttccttagctgatctttaagtagaataaaatttgacaatcgctacacttatgacttttaaaaataaaaactttattttttagaacagatttgtgtttacagaaaaattacaaagatagtatagtcagtttccatataccctgaacatggtttcctctattacaaacatcttatgttagaatggtatatttgttacaattcatgaaccaatactgatacattgatgataatggtaatgatgatgatgatgattgttctgataatgttattgttacacttaacatgagtccatgctttgttcagttttccttggtttgtagctaatgttcttattctgttccagaattgcatccaggatactacatcatatttagtcatcatgtcttcttaagctgttgttggctgtgacagtttctctttcttgtttttatgacctagacaattttgaggggtcaggcattttttagaatgcctcttaatggggatttgtacactttttcataaatagaccgatgttatgggttttggggaaaagatcacagagattaattctgacccttatcacattatatcaactatacataccgttaacatgatatcactgttgaagttgaccttataagcctggccgaggtagtgtttgccaggtctcaccactgtaaatttacccttccttccctttccatattactctttggaaggaaggaactatacagagcccacatttaagggatggaggtttatgctccacttccttacaggtaaaatacctacataaattacttagaattccacatatgcaaaatttgtattttcttatttaatttattccatcatttgattatggactcatggatatttattttacactttgggctataatccaatactacttcatttactttgtcactcagattgttccagttttggctattgggatttctttccattggctcttgtaccggtttgatatattttcatcattgtggatttttttttctattttttatttttgagcactttcttattttcaggtacttcaagataatccaggctcattttgcatatttcttatcccggccctagaatcagccatgtctccaaggacctcagattctttttgttgcagaatggtatttgaaaccaagatctgagcatcaggttgccaccaggatgttattgtttataaagcctcccagcagacagagccagaagatatatgtgtgtttattaagcaatgtatatacgcatatctataaatatttctatatggaagcagtgtctataggaagctacacatgagttcatactgcgatcatcaactttaatccattaccacatgaatcattctaacctgctccccttgcctatctctaaattcttactccaacagaaaaaaacaggctctcaacatctgccatctacttacttaattattcaaatctagtgcacatgtattgcagtactagaattgttaacccatacccacatgggaaaaagtttatcaactagagtacagtgcttatgtacaatgttttttgcaatctgaggctccactgatttctaaaattacttaggtcagcatcttttttcttcaccctattcagtgaagtgtttcatccgtttgtaatacagttagattgtttgtaacagtctgaatttcattttgagatccctgacctgctaaattatacttttaattggcacatattattgttcctactattcacttttttaatgaagtgaacttcacagatatgaaattaaccatttgaatgtgaacaatttagtggcatttaggacattcacagtgttgtgtaactacctctaactagttccagaatatttctaatcacccctaaaaatatgatgtctttatatgactttggtatcagggtaattctgacatcatagaaagagctagaaagtgtttctttcttttctattttttgttagtgtttgagaaaaattgatgttaattctttaaatgtatgtttgaattcatcagtaaagccataaggtcctgggattttctttgttaggaggtttttaattattgatttaatatctttacttgttatagggctgttaggatgttctatttcatcttgagccagcaagggtaatttgtatttctaagatttgtctgtcttttctgtatttgtagtaatgtccccactttcatttctagttttagctatttgtgtatcctctttttttctccttctgtctagctaaagtcttgtcattttgtggattttttttttctaaggaccagcttttggttttgctgagtctctactgctttctattttgtttacctcttttaatctttgtctcctttcttctgctaactttgggttaagtttgatatttattttctaattctttaaggtgtagtattgagttgttagtttagaatctttcttcgtttataaatgtatgtgtctatggctataaattcctcacttagccttgcttttgctgcatcccattactgtggtatgttaagttttgtttgcatttgtcccaagatattctctgatttcttgtgtgattcatcttttgacccatttattttgagtgtatcatttaatttccacatatttgtgaattttctagttattcttctattattgacgtcgtttcattttatcatagttagaaaatattctttgtgtagtttcagttcttttaaaatttattgagacttattttgtagcctaacatatgggctatcttagctaatgttccatgtacacttgaaaagaatatgtattctgctgttgttgggtggagtgttctgtctgtgtctgttaggtctagtgttcaagtcttctatttcctattgagcttcagttattttgttgtatgtattataaaaggtttagtattgaaatatctattattgcataactatgttttgtccctttaattctgtcaatgtgtgcatactccacttctctgttctttcttgtgtgttatgtttatatgttcttgatgaattgacccttttatcaatatacaaagtccttatttgtatcttgcaattgttttcaagtcaaagtctgttttgtccaatactattactgtataaccaccccaactctcttctggttactatttgaaatgaatgtctttgtgtatctttttaatttaaatatatttatatctttagaactaaagtgaatttcttgtagacagcataccattggatcatatttttcaaatccatttggtcatatctctgccttttaattggagcgtttaatccattcacatgtaacatatctgtttgaggaaggatttacttcttccatttgggtatttgttttctatatgttttataccttttttattctttgtatcctccatttgtcttgtttgtgttttgctatttggggtgtattgtttggatttccttctcatttccttttgtgtgtacttttaggaaaatttcttggtgattaccataaaggttctaattaaaatcataaatttataacaatattatttaaatttctacaaattttgcttcaataccatacagtaattacattactatacagttccattccctgccttataattgctttcacaaattacattgttggatattatgtggctattagcataaatttatagtgatgtgtatttatttgtctttttaaatcatataggaaatattataaaaatagaagttgcaatccaaaatgcagtaatacagacttttatatttatctatgcaataacttatattcaatttctatatttcttttttttgacacctagtgtaaccatgtggcctgttttttttattattattactttaaatttttatttttccataggttattggtgtacaggttgtgtttggttatataaataaggtctatagtggtgatttgtgagattttggcatgcccatcacccgagcagtatacgctacaccctatttgtattcttttgtccctcaccccactcccaccatttccccccaagtcgccatagtccattgtaacattcttatgcctttgagccctcataggttagctcccacatatcagcgagaacatacgatgtttggttttccgttcctgacttacttcacttagaataatagtctccaatctcggccgggcgcgggggctcacacctttaatcccagcactttgggaggccgaggcaggtgaatcacctgaggtcggttgttcgagaccagtctgaccaacatggagaaagctcatctctactaaaaatacaaaattagccaggtatggtgtctcatgcctgtaatcccagctactcgggaggctgaggtaggagaatcacttgaacctgggaggcagaggttgtggtgagacaagatcacatcattgcgctccagcctggacaacaagagcaaaactccgtctcaaaaaaaaaaaaaaaaagtcttcaatctcatccaggtcactgcaaataccattaattcattcctttttatggctgagttggtatttcatcatatatatatatatatcaccatttctttatccactcatagattgatgggcatttgggttgattccacaattttgcaattgcagattgtgttgctataaacatgcctgtgcaagtatctttttggtatactgacttctattcctgtgggtagatacccagtagtgggattactggatcaattggttctacttttaattctacttttagttctttaaggaatctccacactgttttccatagtggctgtactagtttacattcccaccagcagggtagaagttttccctgatcactgcatccatgccaacatctactgtttttttttaatatattttaattatagccattctagcttagaaaaagtggtatcacattgtgcttttgatttgcattttcttgatcattagtgatgttgagcattttttcatatttcttggccatttgtatatctttttttgagaattgtctatttacgtccttagcccactttttgatgtaaatttttttggttttttttttttttttgagatggagtttctctctgtcacccaggttggagtacagtggcccagtctcagctcactgcaacctccacctcccgggttcaagcgattctcctgtctcagcctcctgagtagctgggactagaggcgcacttcaccactcccggataatttttgtatttttagtagagatggggtttcaccatattggccaggctggtctcgaagtcctgaccccgtgatccgcccacctcggcctcccaaagtactgggattacaggcgtgagccactgtgcccaactgtttatttttttcttgttgatttgtttgagtttgttgtagattctggatattagtcctttgtcgatgtatagatttcaaagattttctcccactctgtgggttgtatgtttactctgctgactgttccttttgctatgcaaaacctctttagtttaattaagtcccagctacttatctttgtttttattgcatttgcttttgggttcttggtcatgaaatccttgactaagccaatgtctagaagggtttttccaatgttatcttctagaatttttatagtttcacgtcttagatttaagtcattaatccatcttgagatgatttttatataaggtgagagatgaggatccagtttcattctcccacatgtggctagccaattatcccagcaccattggttggaaagggtgtcctttccccactttatgtttttgtttgctttgttgaagatcagttggctgttagtgtttgggattatttctgggtgctccattttgttccattggtctatgtgcctatttttataccagtaccatgctgttttggtgactatggccttatcgtattgtttgaaatcaggtagtgtgatgcctccaggtttgttctttttgcttagtcttgctttggctatgcaccctcttttttggttccatatgaattttagaattgttttttctaattctgtgaagaataatggtggtattttgatggcgattgcattgaatctgtagattacttttggcagtatagtcattttcacaatattgattctacccatccatgagcatgggatgtgtttccatttgtttatgtcaggtatgatttatttcacagtgttttgtagttttccttgtagaggtctttcgactccttggttaagtatattcttaagttgttttttttttttttttttttttttttttttttttttttttttttttttgcagctattgtaaaagggcttgagttcttgatttgattgcttggtcactgttggtgtatagaagagctactaatctgtgtacattaatattgtatccagaaactttgctgaattcatttatcagttctaggagctttctggaggagtctttaggattttccaggtaaatgattatattgccagcaaacagtgacagttcgacttcctctttactgatttggatgccctttatttccttctctttcctgattgctttggctaggacttccagtactatgttgaagagagatggtgagagtgggcatccttttcttgttccagttctcagaggaaatgctttcaactgttccccattcagtattatgttggctgtgggtttgtcatagatggcttttattacactgaagtgtgtcccttgtatgctgattttgctgagagttttaatcataaagggatgctggattttgttgaatcctttttctgcatctattgagatgatcatatgatttttgtttttaattctgtttatgtggtgtatcacatttattgacttgcatatgttaagccattcttgcatccctggtatgaaacccacttgattatggtggattatctttttgatatgttgttgaattcagttacctagtattttgttaaggatatttgcatctatgttcatcagggacatcggtctgtagctttcttttttggttatgtactttcctgattttggtgttagggtgatgctgacttcatagaataaattagggagggctctgtctttatcttgtggaatagtgtcaaaagaattggtatcaattctttgaatgtcttttaggattctgttgtgaatccttttggtcctggagtttttttttgttgatagttcttaaattaccatttcaatcttgctgcctgttattcgtctgttcagggtatctaattcttcctgatttaagctaggaggttagtagtttcccattgatttatctatctcttctaggttttctagtttatgtgcataaaggtgttcataatagtcttgaatgatcttttgtatttcactggtgtcagttgtgatatcttccatttcctttcttattgaggttatttggattttctctcttcttggttaatcctgctaaaggtctataaattttatttatcttttcaaagaaccaggtttttgtttcatttatcttttgtattttttttttgtttcagtttcctttagttctgctctgatcttggttttttcctttcttctgctgggtttgggtttggtttgttcttgtttctctagttccttgaggtgtgaccttaaaatgtcaggttgtgctctttcagtctttttgatgtaggctgaacaccaaaaagaactttcctcttagcaccacctttgccatatcacagaggttttgataggttgtgtcaccattgccattcagtttggagaattttttaattttcatcttgatttcatttttgaccccgtgatcactctggagcaggtaatttaatttacatgtatttccatggttttgaaggtttcttttggagttgatttccagttttattccactgtggtctgagagactgcttgatataatttcaattttcttaaacttattgaggctcatttttgtggcctatcacattgtctatcttggagaaagttccatatgctgttaaatagaaggtgtagtctgtggttattttatggaatgttctgtatatatctgttaagtcaatttgttccagggtctagtttaaatcaattgtttcttcattggttttctgtcttaatgacctctctagtgctgtcagtggagtattgaagtctccgattatcattgtgttcgtgtctatctcatttattaggtctattagtaattgttttataaaattgggagctccagtgataagtgcatatatgtttaggattgtgatattttcctgttggacaaggccttttaccattatatagtgttcctctttgtctttttaaactgctgttgccttaaagtttgctttttctgatataagaatagatcccccttctcacttttggtgtccatttgcatgagatcccttcttccacacccttactttaagtttatgtgagtccttatgtgttaggtgagtctcttgaaggcaccagatagttggttggtagattcttatttattctgtggttctgtatcttttaagtggtgcatttaagccatttatattcaatgttagtattgagatgtgaggtaccattccattcactgtactatttgttccctgtgtatcttgtttttttgttttcactttttaacttgtatttttgttttataagtcctgtgagagttatgctttaaagaggttctgttttggcttgtctccaggattttttttttcaagatttagagatccttttagcagttcttgtagtggtggcttgatagttgtgaattctctctacatttgtttctcaaaacagattgtatctttccttcatatatgacacttagtttcactggatacaaatttcttgactgacaattattttgtttgaggagctgaagatagggtcccaatcccttctagcttgcagggtttctgctgagaaatctgatgttaatctgataggttttcctttataggttacctggtgattttgtctcacagctcttaagatgctttccttcatgttaactttagataacttgatgacaatgtgcctaggcaattatttttttgcaataaattttccaggtgcttcttgtatttggatgtctaggtctctagcaagtccagggaagttttccttgattattcccccaaatatattttccaaacctttagatttttcttcttcctcagaacaccaattattcttagctttggtcacttaacataatcccagacttcttaggggctttgttcatattttcttatttttttactttgtctttgttggtttgagttaattcaaagaccttgtcttcaagctctgaatttctttcttctacttattcaattctattgctgagactttccagagcattttgcatttctataagtgtgttcaatgttttctgaagttttgactggtttttctttgtgctatctatttctttgaatattttccccttcacgtgtatcattttttgaatttccttgcactgggcttcgtctttctctggtgcctccctgattaacttaataactaatttcctgaattctttttcaggtaaatcagggatttcttcttggtttggatccattgctggtgagctagtgtaactttctggaggtgttaaagagccttgttttgaaggataatgttgctgagtatggaatttgtgtctgatagtttttgtcttttatccctttaaaaataccatcacttctatacaccaataatattcaagctgagcaccaaattaagaacacaatcccatttgcaacagccacacacacaaaaataaaatacctaggaatatatctaaacagggggatgaaatatttctacaaggagaattacaaaacagaattacaaaacactgatggaagagatcaaagatgacacaaacaaatgcataaacattctgtgctcatggataggaagaatcaatatcattaaaatgtctatactgcccacagtaatctacagattcaatgctattcctatcaaagtaccaacatcatttttcacagaattagaaaaaaaactattataaaattcatatggaataaaaaaagagtccaaatagccaaggcaatccttagcaaaacaatgaagcatgcagtatcacattacctgtcttcagattatgctacaggactgtggtaaccaaaacaggatggtactgggacaaaaacagaaacatagaccagtggaacagaatagagcactcacatataaagctgcaaacatacaatcaattggtctttgacaaaggtgactaaactaagtaatggggaaaggatgtcctattcaataaataatgctgggaaactggctaaccatatgcagaagaatgaaactggacctttacctatcaccctatacaaaaactaactcaagatggattaaatacttaaatgtaagacctaaaacttttgaaattctagaagaaaaccaaggaaatattcttttaggcattggcctaggcaaagacctcatgactaactcctcaaaaacaaatgcaacaacaacaaaaaaaatggatgtaggagacctaattaaacaaaagcttttgcatggcaaaagaaactgtcaaggagggaaacagataacctacagattataagaaaatatttgcaaaatatgcatctgacaaaagtctaatgtccagaatatgtaaggaacttaaacaaatcaatgagaaaaaaaaaaaactccattaaaaagtgggcaaaggacatgaacagacacttctcaaaaggagacatgcatgtggccaaaaaatacatggaaaaaaatgctcatcattactagtcattagagagatgcaaatcaaaaccataatgagatgccatctcacaccagtcacaatgattattacaaacaagtcaataaataggagatgttggcaagggtgtggagaaaagggaatgcttatacattattagtggtaatgcaaattagttcaagccttgtggaagtcatttggaggtttttcaaagaactaaacagaattaccatttgactcagcaatcccattattgggtatatacccaaggaaaaataaattgttctaccaataagacacttatactcatgtttaatgaagcacaatttacagtagcaaagaaatggagtcaactcaagtgaccattagtggtggattgaatatagaaaatgtggtacatatactcaatggaatactatgcagtcatacaaatgaataaaatcatgtcatttgcagcaccatggaagtaaatcaactcaaaatgccagaataatttttttcctccaaactactgcagtacctctccagcaagtgttctgaaccaggctgagatggttgaaatgacagaaatagaattcagaatatggacaggaacaaagatcattgagatgcaagagtacattgaaacccaatcaaaggaagctaagaatcatggtaagacgttacaggaactaacagacagaatagccagtatagaaaaaaacataagcaatctggtggaactgaatacatactacaagaatttcataatgaaaccacaaattttaatagtagaatatatcaagatgaggaaaggaactcagagcttgcaaactggctttatgaaataagacagtcagacaagaatagagaaaaaagaatgaaaagaaatgtagaaaacatctgagtaatatgggatatgtgaagagacaaaatccatgactcatcggtgtccttgaaagacatggggagagtgtaagtaacttggaaaatgtgtttcaggatatcgtccgtgaaaacttccccaacctagctagagaggccaacactgaaattcaggaaatgcagagaactgtagcaagatacttcacaagaagatcatccccaatacacataattgtcagattctccaaggttgaaatgaaagtaataaatgttaaaggcaggtagagagaaaggtcaggtcacctacaaagggaagcccatcaaactaagagcagacctctcagccagaagagaatgggggcccatattaaacattcttaaagaaaagatattttaacccagaatttcatatccagccaaactaaactttataagtgaaggagaaataagatctttttgagacaagcaaatgctgagggaatttattaccaccagacctgcttcctgaaggaagcactaaatatggaaacacatttatgtacacagaccagtgacactgtaaagcaaccatacaaacaagtcagactaataaccagctgataccatgatgacaggatcaaattcacacatatcaatactaaccttgaatgtaaatgagctaaatatcccaattaaaaggcacagaatggcaagctgggtaaagaaccaagacccattggtacacttacttcaagggacccatttcacaagtgatgacacacatagtctcataataaagaaatggagaaaaatctaccgttcaaatggaaaacagaagaaagcaggggttgcaatcctagtttcagacaaaacagactttaaaccaacaatgatcacaaaagacaaagaagggcattacataatggtgaagggttcaattcaacaagaagacctaactatcctagatatatatgcacccaacacaggaacacctagttcttagagaccttcaaagagacttagactcccataaaataatagtaggagacttcaacactccactgacagtattagacagattattgaggcagaaaattaacaaagatgtctaggacctgaactcagcattgcatcaaatagacctgatagacatctacagaactcttcacccaaaaccgcagaatatacattcttctcattgccacatggcacattctctaaagtcaaccacataatctgagacaaaacacttctcagcaaattcaaaagaactgaaattataacaaccactctcttggaccacagtgcattaaaattagagaccaagactaagaaaatcacccaaaaccatacaattagatggaaattgaataacctacacctgaatgacttttgggtaataatgaaataatgaaattaaggcagaagtcaagaagttctttgaaactaatgagaacaaagatacaacataccagaatctctgggacacagttaaggcagtgttaagagggaaatttatagtaccaaatgcccacatgaaaaagctagaaagatctcaatttaacaacttaacatcacaactaaaagaactagagaactaaaagcaaaccaaacccaaagctagtagaagacaagaaataaccaaaattagatctgaactgaaggataatgagacacgaaaagccactctaaagataaactaatctagaagtttgttttttaagaaaactaataaaatagactactagctagactaatcaaaaagaaaagatagaaaatccaaatagggcggtccattccaagatggccaactaggaacagctccggtttgcagctcccagcgtgattgacgcagaagacaagtgatttctgcatttccaactgaggtacctggttcatctcattgggactggttggaaagtgggtgcagcccatggagggcaagccgaagcagggtggggcaccatctcacccgggaggtgcaaggggtcaggggatttccctttcctggccaagggaagccgtgacagactatagagggaaaatcaggacactgccacctaaacactgcgcttttccaacggtcttagcaaatgacacaccaggagattatatcacgcacctggttcagtgggtccctacacccacagagccttgctcactgctagtccgagatttaactgtgaggcttcaagcctggctgggggaggggcgtccaccattgctgaggattgagtaggtaaataaagcagcctggaagctcaaactgggtggagcccattgcagctcacggagtcctgcctgcctgtgtagactccatctgtgagggcagggcatagctgaacaaaaggcagcagaaacttatgcagacttaaacctccctgtctgacagcactgaagagagcagtggttctcccagcacagtgtttgagcactgagaacggatggactgccccctcaagtgggtccctgacccccatgtagcctaaattggagaaacctcccagtgggggccaactgacacctcatacagccaggtgcccctctgagatgaagcttccagaggaaggatcaggcagcaatatttgctgttttgcagcctccacgggtgaaacccaggcaaaaagggtctggagtggacctccagcaaactccaacagacctgcagctgagggaactgactgtgagaaggaaaactaacaaacagaaaggaatagcatcaacatcaacaaaaaggacatccacaccaaaaccccatctataggtcaccaacatcaaagaccaaaggtagataaaaccacaaagatggggagaaacaggagtagaaaagctgaaaatactaaaaaccagagtgccccttcttctccaaaggattacggctcctctccagcaatggaacaaagcaggaaagagaatgaccttgatgagtttacagaagtaggcttcagaaagtaggtaataacaaacttctctgagctaaaggaggatgttcaaactcattgcaaggaagctaaaaaccttgaaaaaagattggacgaatggctaactagaataaacagtgtagagaagaccttaagtgacctgatggagctgaaaaccatggcacgagaactaaatgatacacgcacaagcttcggtagccaatttgatcaagtggaagaaacggtatcagtgattgaagatcaaatgaatgaaatgaagtgagaagagaagtttagagaaaaaaagagtgaaaagaaatgaacaaagcctacaagaaatatgggagtacatgaaaagaccaaatctatgtctgattggtgtacctgaaagtgacgaggaaaatggaaccaagctggaaaacactcttcaggatattatccaggagaacttccccaacctagcaaggcaggtcaacattcaaattcaggaaatacagagaacaccacaaagatgctccttgagaaaagcaaccccaagacatataattgtcagattcaccaaggttgaaatgaaggaaaaaatgctaagggcagccagagagaaaggttgggttacccacaaagggaaccccatcggactaacagcagctctcttggcagaaaccctacaagtcagaagagagtgggggccaatattcaacattcttacagaaaagaaatttcaaccgagaatttcatatccagccaaactaagcttcataagcgaaggagaaataaaatcctttacagacaagcaaatgctgagagattttgtcaccaccaggcctgccttacaagagctcctgaaggaagcactaaacatggaaaggaaaaactggtaccagccactgcaaaaacatgctaaattgtaaagaccatcaatgctaagaagaagctgcatcaactaatgggcaaaataaccagctaacatcataatgacaggatcaaattcacacataacaatattaaccttaaatgtaaatggcctaaatgccccaattaaaagacatagactggcaaattagataacgagtcaagacccatcagtgtgctgtattcaggagacccatctcacatgaagagacacacataggctcaaaataaagggatggaggaagatctaccaagcaaatggaaagcaaaaaaaaagcagggtttgcaatcctagtctctgataaaacagactttaaaccaacaaagatcaaaagagacaaagaaggccattacataatggtaaagggatcaattcaacaagaagagctaactatcctaaatatatgtgcacccaatacaggagcacccagattcatagagcaagtcctgagagacctacaaagagacttagactcccacacaataataatgggagactttaacaccccactgtcaacattagacagatcatcgagacagaaagttaacaaggatatccaggacgttatctcagctctgcatgaagcaggcctaatagacatctacagaactctccaccccaaatcaacagaatatacattcttctcagcaccacatcacacttattacaaaattgaccacatagttggaagtaaagcactccttagcaaatgtaaaagaacagaaatcacaacaaactgtctctcagacgacagagcaatcaaattagaactcaggattaagaaactcactcaaaactacacaactacatggaaactgaacaacctgctcctaagtgactactgggtaaacaacgaaatgaaggcagaaataaagatgttctttgaaaccaatgagaacaaagacacaatgtaccagaatctctgggacacattcaaagcagtgtgtagagggaaatttatagcagtaaatgcctacaagagaaagcaggaaagatctaaaatccacaccctaacatcacaactaaaagaaccagagaagcaagagcaaacacattcaaaagctagcagaaggcaagaaataactaagattagagcagaactgaaggagatagacacacaaaaaacccttcaaaaaatcagtgtatccaggagctggttttctgaaaggatcaacaaaattgatagactgatagcaagactaatgaagaagaaaagagagaagaatcaaatagatgcaataaaaaatgataaaggggatatcactattgatcccacagaaatgcaaactaccatcagagaatactataaaaacctctacgcaaataaacttgaaaatctagaagaaatggataaattcttggacacatatatcctcccaagactaaaccaggaagaagttgaattgccaaatagaccaataacaggctctgaaaatgaggcaataattaatagcctaccaacaaaaaaagtccaggaccagatgagttcacagccaaattctaccagaggtacaaagaggagctggtaccattccttctgaaactattccaatcaatagaaaaagagggaatcctccctaactcattttatgaggccaacatcatcctgataccaaagcctggcagagacataacaagaaaagggaattttagaccaatatccctgatgaacatcgatgggaaaatcctcaataaaatactagcaaaccgaatccagcagcacatcaaaaagcttatccactaagatcaagttggcttcatccctgggatgcaaggctgtttgaatatacacaaatcaataatgtaatccatcatataaacagaaccaaagacaaaaaccacatgattatctcaatagatgcagaaaaggccttcaacaaaattcaacaacccttcatgctaaaaactctcaataaactaggtattgatggaatgtatctcaaaataataagagatatttatgacaaacccacagccagtatcatacggaatgggcaaaaactggaagcattcccattgaaaactggcacaagacagagatgccctctctcaccactcctatgccacatagtgttggaagttctggccagggcaatcaggcaagagaaagaaagagaggacactcaattaggaaaagaggaagtcaaattgttactgtttgcagaagacatgattgtgtatttagaaaaccccatcgtctcagcccaaaatctccttaagctgataaacaacttcagcaaagtctcaggatacaaaatcaatgtgcaaaaatcacaagcattcttacacaccaataacagacaaacagagagccaaatcatgagtgaatgcccactaacaattgcttcaaagagaataaaatacctaggaatccaacttacaagggatgtgaaggacctcttcaaggagaactacaaaccactgcttaacaaaataaaagaggacacaaaacaaatggaagaacattccacgctcatgtttaggaagaaacaatattgtgaaaatgaccatactgcccaaggtaatttatagattcaatgccatccccatcaagctaccattgactttcttcacagaattggaaaaaaaaactactttaaacttcatatggaaccaagaaagagcccgcattgccaagacaatcctaagcaaaaagaacaaagctggaggtatcacgctacctgacttcaaactatactacaaggctacagtaaccaaaacagcacggtactggaaacaaaacagatatatagaccaatggaacagaacagagtcctcagaaataatacaatacatctacaaccatctgatctttgacaaacctgacaaaaacaagcaatagggaaaggattccctaattaataaatggtgctgagaaaactggctagccatatgaagaaagctgaaactggatcccttccttacaccttatacaaaaagtgattcgaggtggattaaagacttaaatgtcagacctaaaactataaaagccctagaagaaaacctaggaaataccattcaggacataggcatgggcaaggacttcatgactaaaacaccaaaagcaatggcaacaaaaactaaaatagaaaaatgagatctaattaaattaaagagtttctgcagagcaaaagaaactaccatcagagtgaacaggcaacctacagaatggtagaaaatttttgcaatctcttcatctgacaaagggctaatatccagaatctacaatgaactcaaacaaatttacaagaaaaaatcaagtagccccatcaaaaagtggggaaaggatatgaacagacacttctcaaaagaagacatttatgcagccaaaaaacacatgaaaaaatgctcatcaacactggccatcagagaaatgcaaatcaaaaccacaatgagataccatctcacaccatttagaatggcaatcattcaaaagtcaggaaacaacaggtgctggagatgatgtggagaaataggaacacttttacactgggtgggagtgtaaactagttcaaccattgtggaagacagtgtggcgattcctcaaggatctagaactagaaataccatttgacccagtgatcccgttacttggtatatacccaaaggattataaatcatgctacgataaagacacatgcacacctatgtttattgtggcactattcccaatagcaaagacttggaaccaacccaaatgtccaacaatgatagactggattaagaaaatgtggcacatatacaccatggaatactatgcagccataaaaaaggatgagttcatgtcctttgcagggacatggatgagactggaaaccatcattgtgagcaaactatcgcaaggacagaaaaccaaacactgcatgttctcactcataggtgggaattgaacaatcggaacacttggacacagggcagggaacatcacacagcggggcctgttgtggggtggggggatgggggagggatagcattaggagaaatacctaatgtaaatgatgagttaatgggtgcagcaaaccaacacggcatatgtaacaaacctgcacattgtgcacatgtaccctagaacttaaagtataatagttaaaaaaaaaaaagaaaatccatataaacgcaagtagaaatgacaaagaggatgttaccactgaccccacagatatacatatagccatcagagaatattatgaacacctctatgcacacaaactagaaaatttagaagaaatgaataaatttctggatatatacacactcccaagactgaatcaggaagaaactgaatccctgaatagatcaataacaagctttcaaattgaatcagtaataaatagcctatcaaccaaaaagaagtctgtgaccaaatggattcacagccaaattctactaggtgtaaaagaacagctgataccattcctactgaaactattccaaaaaattgacgagggactcctacataactctttctacaaggccagcatcatcctgacacaaaaacttggcagaggaataacaaaaaaggaaacttcaggcacatatccttgataaacattgatgcaaaaatcctcaacaaaatactggcaaaccgaatccagcagcacatcataaagcttatccaccatgatcaagtaggctttatccctgggatgcaagggtggctcaacacacacaaatcaataagtgtgattcatcacataaaccgaactaaagacaaaaaccacaccattatctcaatagattcagaaaaggctttcgataaaattcaacacccttttatgttaaaaactccaaattaactaggcattaaagaaacatacctcaaaataataagagccatctatgacaaacccacagacaacatcatactgagtgtgcaaagctggaagtatttccctcaaaaactggaacaagataaggatgccctctctcaccactcctattcgacatactattggaagttctggccacagcgatcaggcaagagaaaaataataaagggcatccaaataggaaaagagaaagtcaaactattcctgttttcagatgacatgatcttatatctagaaaaccccatagtctaagcccaaaagctccttaagctgataaacaactacagcgaaatctcagcatacaaaatcaatgttcaaaaatcactagcagtcctataccccaacaacagtcaagccaagagctaagccaggaacacaataccattcacaactgccactaaaagaataaaatacttagaaatacagctaaccagggagatgaaaggtctctacaaggagaactacaaaacactgctcaaagaaatcagagatgatgcaaacaaatagataaacattacatgctcatgaataggaagaattgatatcattaaaatggccaaagcaatttatatattcagtgctgttcctatcaatctactgaggacattcttcacagaactagacaaaaaatctattttaaaattcctatggaaccaaaaaagagcccacaaagccaaggcaatcctaagcaaaaagagcaaagctggaggcatcacactatccaacttcaaactatactatagggctgcagtagccaaaacagcatgacactggtgcaaaaacagacacatagaccaatggaacagaatagagagctagaaataaggctgcacacctacaactacctaatctttgacaaacctgacaaaaacaagcaatggggaaggattctctattcaataaatggtgctgagataactggctagccatatgcagaggattgaaactggaccccttctttataccacataaaaaattaaggcaaaatggattaaaggcttaaatgtaaaacccaaaactataaaaaccctggaaaacaaactaggcagtacccttctagatgcaggaacagacaaagatttcatgatgaagatgccaagagcaattgcaacaaaagcaaaaattgacaaatgagatctaattaaagagcttctgcacagaaaaataaactatcaacagaataaacagacaacctacagaatgggaggaaatttttgcaaactatatagttgatgaaggtctaatatccagcatctataaggaacttaagcaaatttacaagaagaaacaaccaaccaaccctattaaaaagtgagaaaaggacatgaacaaacatttttctaaagaagacatacatatgaccaacaatcatatgagaaaaagctcaacatcactgatttagagaaatacaaatagaaaccatgatgagataccatctcacaccagtcagaatagttattattaaaagccaaaaaatagaaggtgctggcaatgttgtggagaaaagggaatgcttatacactgttagagggagtgtaaattagctcactcattgtggaagacagtgtgacgattcctcaaagacctaaaaacagaactaccattcaatgcagcaatcccattactgggtatatacccaaggaatatacccatgcatgtgtgtatgttccttgcagcaccattcacaatagcaaagacatggaatcaagctaaatgctcatcagttgtagactggataaagaagtatagtacatatacaccatggagtactatgcagccataaaaaggaacaagatcatgtccttttcaggaacatggatggagctggagaccattgtccttagtaaactaaagcaggaacagaaagccaaataccgcatgttctcacttataagttaggaaaaataactaatggctactaggcttaatacctggttgatgaaataatctatataacaaatccccaagacataagtttacttatataacaaacctgcacagctaccgctgaacttaaaataaaagtttttaaaaatgtaatacatatacaccatggaataccgtgaagtcataaaaagagtaaaattatgtcctttgcagcattatggatgcagctggaggctattatttaaagcaaagtaatgcagacaccaaaaatcaaatcaaatatcattctcacttataagtgggagctaaacattgggtacacatagtcataaagatgggaataacagtcactggggactactagaaaggggaaagaaggaggagagcaagtgctgaaaaactacctattgggtactatgctcactgcctgggtgacagtttcaatcataccccacacctcagtatcatgcaatagacccatgcaacaaacttgcacatgtacacctggattctaaaataaaagttgaaaaggaaaaaaaatgattctttatctttgattatgatgtgtctaagtgtacttctctttgagtttattctgcttggaatctattgaggttcttggattaatcaaatttgagattattttagccactatttcttctcacaatctttctgttcctttctctctctcttcacctaatgggttcccataacacataggttggtactcttaatggtgctcaatgtgtcccttagacggtcttcactgtttttccctcttttttctttctgatcctcaggcaataatagtttcaatttttcaatattcaagtttgcgttctttcttctgcatacttaaatctgctgttcagtgccagtagtaaatttttcatttctattattatacttttcagctctagaatttctattttgtttcttcccataatttctatcttttattaatattttcatgttattcatacattgttttcctggtctcttttagttctttggttatattatggtagctgattttaaaactttgccttgcaagttcaatcattgggcttcctcagggatagtttcagtcaatgaatttgtcctgcgaatgggccatacttttcttttgtttgaatgccttgtaatattatattgtggtaactccaaaaatcagattttgccctttccccaaattttgctgttgtttgtttctgaggggtgccgtaatttatttgtttagtttcttttggaatgtttttttgctaaggctatatttctggttgtgtgtgctctctgaagtcttcatttcattgtctcagtggtcagccagtgacctgacagaggtttccttaaatgtctgtagccaaaaagagagaaaaaaaattttctctcagtctttgaagtttggctttaagccggggcattcattcagtgctacgccagcttacctccatctctgccttagccttcagcacctgattttgcaaagtctactgatccacagtgtgagaagtgtgaattctccaacgttgaacagcttcgttcttcttaattattatgttggctaatctttctttttcagaggtcaaaatatagttttaatgtgtatttgggactctgagttacagcagcctttttcctactccaccctctacttatttggtcagttgtttctcacaggctttgtacagcgaattcaccctagtaagtacagcaggctgatacttaattttactctgaatgctggtagatgaaaacaacagtgtcattgcctagtaaatggaactaattctcagacttagtgtcaaggagccagaaagggcagtgatttcatgacctagttaaaggcacagtcattactcagctcccactaattttggtcatgtaaaaacacaggcccaatgatactagatattatactttctgcagataaccacggcaacatttcccattcatatgcttttctagaaccttgcctctcaccattaagaaaggaagcgtgtggcccatctccttgaaatctgagaagaggggtcatagaactagaccgctgtggaagttatgccataatgacgtccaaggagagctcctaaagacaatacaatttttgtttggctctcccttaggacactcatccttggatcccagtgccctggtgtgtaagtaagcccaggacagcaggggaggcccacatggagagtgactgaggccccaggccctcagccctgaaagaattcccagcccacagccagaaccaacttgccagcccacagccagaaccaacttgccagcagtgtgagagccattttaggagtggatcttccagccccagtgacactccagctgataacccatgagcgagtaagtcttctacaccaagctatgcccaaattgcacatttgcaagcaaaatatgattgtgtttttgagtcactttgttttatagtggcttgttatacagcagcagataattcagccaccgagtcttccaaattctcaagaaaagcaaaatatttaaattttcaagtgaaatctctgatttttaaatactaactagttccaaattgaaaactatcttctataaggttttgaatggttccaaacacatagaacagataaatactcaaagtgatggatacctcaaataccctgactttatcattacacattctatgtgtataacaaaatatcacatgtacccataaaaatgaatcacatatatgtaaaatgttatgatttaatacaaagtaaagaaataaaatacctgctataagttgtgtaaaaacatcttcatgttattttcagccttctacccacagtctacatggggtatctcaattaattgtcacaataatgctgccaggtagttgctgtgtcttcgtttttttcagataacccccaaatcagtgaataaactagttcagagtcacacggccagtaagaaatagggtcaagatctgagctcagcaaagtctgtctgcttttttctacatcataccatgcttttaagcttaatacataagacagattatttcctgcttcatttagtcgtcctatttctgccttatttagaaatagttccaaggcgatttagtttcttgcacttttctaccctgttgctgctgttttatttttcttatacttcatttcacttgaactcctcacctccagcttcatttattctcttggggtccaaaaagaaaatgattataaaccaaggaaggttgcaatgatcctttcccccagggaattttcccagggctgtagccaagtgccagtttggtttagaagggacgtataaccatcggaggccaagctagattggcatgtgtccctagcaaattcacacagcatgaagttgctattcatgccttcagtactgccattttgtgaggcgttttgattttccctatacattctttgtaaccaattattattgcccctgatcctctttgctacaaaagttcaatagagatgggacctgcagagtcagtatttggatgtctgtgtttgtgtatctatttggctgtaaatgcaagagacaagaagcagtgtttttctatcacatttggaaaaggaaagaggaaagatatgttgagagtcaccattatttcctaggtgattataaaaccagaaaagaaaagaaaagaaaagaaaagaaaagaaaagaaaagaaaagaaaagaaaagaaaagaaaagcctactgttattttttggataacaatcttatccttggaacaaatccagctgaatcaagaaagcactttatgcttcaaatctcgtataataaataggttttcaggtgaatggtcttaatttttatggtaacaactgtttagataactgtgtttttttccttagtgagttctattcctggttagtataggtctgaaacatgtttaaaatacattcacgtaaagcctgatttgtaacttttaaacctactaagtgtagcttatatcattatgctgcaattgtatgcacatgaccatgaggcatgatttcctgaactgggtgggagataggggcacagaatttttgactcagttccattgctttaacctggaaaaaaaattccaacatccttggaactctgattttctgcttgtaatacatggagtgtaacagctgagccacaggctgttttgagaacagaacaaaaagctataaatatgtcagtcaataaaactctaccaagcaaagagcctttataaattcaaaacactattgatggttttaaattattttctctgaaaaaaacataacatcagaggttatttaacttttctattatttataatacagtcaccaatttagagataggagacttaattttctcttttgtccaaaatcaactcaaattatgctcagagaaccatagtatcttaagcagtaagagatttggggaaaacaacatttaaaaaaaaaaagggttattgtgtggccaggtaagtttgtgaagtgcctgagcatacactattgttgtaaaatgtattaatgcccagtaaatgtccattctcttccatctctattctgtaagaggagctgtttccccacctattgttatggggtttggtcatgtgacttgctttgaccaatgggatgtgagtggacataatatataccagtccaagtagagaatttaacccaagtcaaacatgtgtttggctcagtctcctcacttctgcccactgtcctaagaggagttttctccaggtaaacactactgcttcaacctgggtcccagaaagacaaacacatgctctagatctgtgtcacctaccattgccagctgacccaacacagaggacttatgaaaaatacataatagttgtaagctactgagatttggagttttttattatagagcattttcatagccaaagttgattaattcatacattaaacatcttcttaaccacaagacttccagggcattcagtttgctgatgtcctctgtagatctcaaaattaattggccctagacttatgtgttctacagaaacactgacttaaaaataaaatttttagagcagcattttttaagaccacatgatgtcttttcaaaggcagagggttaagtttacaagcatcctatcttcatagcactcaataatagatatggctttattgtgtggtcacatccattcatctaggctggtgatataaattagtggtcaaagcattcgctttggaatcatacaagccttaatttaaattatagccccaccacttaagagataggagaccttgggaattcatgtatgttctccgagacttaatttccttacctgcaaaattaggataataatattaatagttacattataaaattgtgaagattaactgatatatataataagcttagcacaatgtctgacacagagcataagctcaagaaatgatagctgatgttactacttttagaggtccatgtccataaaaccctttatagagaaattggaagtaggaaaattagagtaaagttaacacaggacacattgattttaatcaaagaacagattacttaggaggaaatgaccttcttttttttattattatactttaagttctggggtatgtgtgctgaacatgcaggttggttacataggtatacatgtgccatggtgatttgctgcacccatcaacctgtcatctacattaggtatttctcctaatgctatccctcccccagctccccaccccctgacaggctaccagtgtgtgatgcccccaaccctgctgtgtccatgtgttctcattcttcaactgccgcttatgaatgagaacatgcgatgtttggttttctcttcctgtgttagtctgctgagaatgatggtttccagcttcatccatgtccctgcaaaggacatgaactcatcctttttatggcttcatagtattccatggtatgtatgtgccacattttctttattcagtctatcattgatgagcatttgggttggttccaagtctttgctattgtgaacagtgccgcaataaacatacgtgtgcatgtgtctttatagtagagtgatttataatcttttgggtatatatccagtaatgggattgctaggtcaaatgctatttctagttctagatccttgaggaattgccacactgtcttacacaatggttgaactaattgacactcccaccaacagtgtaaaaactttcctatttctccacatcctctgcaacatctgttgtttcctgactttttaatgattgccattctaactggtatggattttggtatctcattgtgcttttgatttgcatttctctaatgaccagtgatgatgagctttttttcatatgtttgttggctgcataaatgtcttcttttgaaaagtgtctgttcatatccttcacccactttttgacgagggtgtttgtttttctcttgtaaatttgtttaagttctttgtagattctggatattagccctttgtcagatgaagagattgcaaacattttctcccattctgtaggttgcctgttcactctgatgatcttgaaaatggtcatattgcccaaagtaatttatagattcagtgctatccccatcaagctaccattgactttctttacataattggaatttcatatggaaccaaaaaaaagtctgcatagccaagacaatcctaagcaaaaagaacaaaccaggaggcatcatgttacctgacttcaaactatactacaaggctacagtaaccaaaacagcatggtaccggtactaaaacagatatgtagaccaatggaacagaacagaggcctcagaaataatacacctacaaccatctgatctttgtcaaacctgacaaaaacaagcaatggggaaaggattccctatttaataaatggtgttgggaaaactggctagccatacgcagaaaactgaaactggatcccttccctacaccttatagaaaaattaactcaagatggattaaaggcttaaacgtttacactgttggtgggattgtaaactagttcaaccattgtggaagtcagtgtggtgattcctcagggatctagaactagaaataccatttgacccagccatccctttactgggtatatacccaaaggactataaatcatgctgctataaagacacatgcacacgtatgtttattgcggcattattcacaatagcaaagacttggaaccaacccaaatgtccaacaatgatagactggattaagaaaatgtggcacatatacaccatggaatactatgcagccataaaaaatgatgagttcacgtcctttgtaggtacatggatgaaattggaaatcatcattctcagtaaactattgcaagaacaaaaaaccaaacaccgcatgttctcactcataggtgggaattgaacaatgagaacacatggacacaggaaggggaacatcacactctggggacagttgtggggtgggggaaggggggagggatagcattgggagatatacctaatgctagatgacgagttagtgggtgcagtgcaccagcatggcacatgtatacatatgtaactaacctgcacattgtgcacatgtaccctaaaacttaaagtataataataataaatttaaaaaaaaaagacttaaacattagacctaaaaccataaaaaccctagaagaaaacctaggcaataccattcaggacatagacatgggcaaaaacttcatgactaaaacacaaaaagcaatggcaacaaaagccaaaattgacagacgggatctaattaaactaaagagcttctgcaaagcaaaagaaaatatccttctgtatcatttttttctgttttggctcaattcatctatctattttccaaataacatttttatattactgaattaaaattttcccaatctccacccttctacacgaaccttctccaccccttcaccccaaagtagaaatgtggaaagacagaaacagttgatgttctgtctgcattttgtttacatgggtaggggaagccaccctgtacctgatgtctctggaggcttccagagcttcacatttccacaaagcacctgctcaactcaagttagcagtttctgttcctattaaaaatccaaaaatcagagttggaattttgaatcacatgggaagtttcagtgtttcaaagcatgaagtagagcttccctaacccctgctatgactactctgctttcagtgttggaaaggaaatgatcttttaaaaggtggaatatgcaaaaggggaaaacagttctcctctgtcttttcctggggtcgggagggggattgaggcatttccccaaagagccctgctaactctgtgaccttccaagattcgttaactgtgccagagaaggaaatgtacctgcaattgctcattggggtaatatttaagtcaaggctggatttcaagctcaatttaagtgctacattttgattttttttaagaagaaagatttgcctgtaaaaatgctacttttcttatacaagatctataaacatgctttgacaacctttgaaattgattaaaagtgggcttatatttctaaatggagatgccttgagtcaggatgagtaagctaagaaaatctattcattttagatatattttaactctccttactgtgcattgaaattatcaataatttccagttattctttgtttatattttggcaccattttattcccctcccctcaaaaaaaaactccaaacactaaggtgaaatgtaagcaaatagtactggaaattttataaattttatacatagcaatcagaagtttataaagtagatcattctgaaggcagattatgttaatcagtcaaactatttaaaagcaggagtgccaatgtgggggtaaactcaactctttcgaagagctcatttgttaacacatttatcgatatccccagttgccatctccttaatcttttgctcactcggaggaaaattcctaatagcaagatacacatgaagacagcagaacatttacaagaaagtcagccagacatgtggcagccaaggtctgtcaaagtgtagagaattttttgtatgtggcaaaatacacataacataaaattgaccattttaaccattcttaaatgtacagttaagtggcattaagcacattcacattgttctgcaaccatccttaccatccatctccagaactttttcatcttttaaaactgaagctccatacccattaaacagtatctccttattctccctttcctagcctctggcaaccaccattctactttctgtttctacaaatctgagtgctccaggtacctcttataagaggaatcatacagtatttgtccagtttgtgcctggcttatttcacttagcataatgctctcaaggttcttccatgttattgtatgcatccaattttccttctttttaattctgaataatattccattgtatagacatattgcactttattatttactcatctgttgataaacctttcagtggcttcttccttttggttattacgaataatgctgctatgaacatgggagtgcaaatgtctgttcaagttcccgtttttaattatttcaggtatatgccaagaagtggagatgctggatcatctggtaatttaacatttaatttttgaagacccactatactgttttccgcagcgaccgtaccatattacgtttcctaccagtaatatgagaaggttctactttctccacatcctcaccactatttgtctttttatgcttttgttttaatactagacatcctaatgggtttgaggtggtatcttgtgattttaatttgcatttccctaatgattagtgacactgagcatcttttcatgtgcttattggccatttgtatatctgctttggggatatgtctaagtcttttacccattttcaaaattgatacgcagcagatgtacatattttcggaattcacatgacaatttgatacacttatataatcaaatcagattaattggaatattcgttatcttaaatacttttctttatactaggaacattcacaaaattatcttttagctattttgaaatatacaatgaattaatatctgcagtcataccacctgaatgcatctcatctcatctgcccattttttaattgggctacttatatttttgttgttgaattaggaaaaattagattcatagcttaattatgatgaatgtatttatcatctcaaaaattataaaaaaagagaaatattatgaggtcatattttacttcattgttgaaataattgttgaataaatagaatacatttttattcagcaaagggagatttttttgtgtgtagcttattctatataaattatatacttccatatttagtggaattctcttctttcacagatatttcttttagactcccacttttagcaaataaagtcaagaaaagtgttttcccagtatttctcctctcatcttcttcctgccttctgtttgctcatttcttcttgctgtgaaacgtccgtgttcctggcagcaggctgttttctgtttgttttggagatgtacccgctggcctagcgtgggtaacatgaaaaatcttacaggctcctcttagccctgaaatgtcatcaccatgtcctgtccccaagccatacagcatccagcagcctcactggaagttgtaaaacagcacttacttggcactgaccctgtgccaggcattagcctaagtattttacagacattgatgcctttaattcttgtgataaccctatgtatgctattattgtccccattttacaaatgtggacactgaggcacagaaaaaataagtaattttcctggtgtcatgcagacagtaaatgtggaagctagggagcccggctgccactgcttctcagcacagcaccgggctgcctttgggataattgtcatattccctttcttggcctcaagggcttccatatccagtcttccccacgaacccccaacagcttcaacacatgtcaaccacccccagtttaaagcaagttgcccagaggaattttttgcgacttttgagtcttttcatttaagaatatacttttatgctcaaacataaaatctggtaataaggttattattatatctatatctcagcttcatccaatttgctgtcgtctctctttattatatacttgattgatggactgatgcaccatggaggcattgctgaattgaagagaagagacatcggggtggaattaatcatgcagcagattgctacataactcttatttcccatgagatgagaatcacagtgataaaccatgaagacagctgtatgtggcctaaaactaagaccagaatgctcaaataagttccaatttatcttgtttccagagataaattagtaggaaggggtgaaaaggagaaatatttgtgaatcatacagtagtcacagctattggttgatgtctaggatattaaaatgtgaaagtattacgactaaaaatcctctgctgtctaatctctcacagcttatatttgatgttccctaaaatcacggtgtccaaagacagaccatgtttttctagaattcctgtaatgaagatctttgcaagatgccgcaattttgaatgtcccaaaccacaaagaggtttcagttcttcctttcaatccccaaccttgaactgaagcctctgcagaaagctcccagctcactagtgtggacaggcaactacttgtgcttctatgagagagaaaaagtgagcagtttccaagagacagaaaacactggccctgagaataaggaccaaatgagaaaccagcagtgcaaaagacaggaaagaagtccaggtggaagaaaaatgtcaatttgttagaagtgagaaagaacgagagaaggtgcaggcagacacaatgaagagttacaggaagggttaatcagtgactcagcaatacgtgctattattatttgtcttaaatagatgaagaaactgaggcacaggggagagggaatgcaggaccactcagcatgtggcagtgatggaacgtgaagaaactactactccaacaccccactatccaggatgacttccagcactactgttttcactgttgttctagatataatagctgattctgtaagggaagtcacagttattattatctgcagatgatataactgaattttcagaaagcctgtaaaatcagttaaaaatttagacctaatattaacatagggtaatgttgccaaatctcaaaccaatatagcaaagttacatagcttttcaagtgcaagcaataatttgttcaaaggcataattcaaaagcaagtatgaatcacatgaccaaaaaagtccccccaaaacaaggaacaattttatgactcaatgtgaaaaggcaaaatataaaatatcaaatttacctgaagattataaaatcttagcaattagaaagacatatcatgtggtaccgaggataatatggcacaatgtcaaatcttcatgaagaaatataacagtttaatacttttaatcaaaatctgataaaatttcttttgaaagtattaaagagcattttctggaaaaataacaggcaaaaatagccaagacttaaaaagctaaaacaaaaaccaaaaacgctggctatggcccctccttgcagatatgagatgtaacaggagtcatagtaacagtagctactatttataattgatctgtggcaaacactgttctctgtctttggtgagttttcccatttctcctcttccaacaaccttattcagaagaagctgtagctacctgtttttggcagaggccagagagtttgagcaccttttcaccagctcaccaactcaatggtggactttagcaaagcattatctaattttagtacccacctgcttacccactatactataaactacaaaaagcagaacagcgtagcatttttgcataaatggtggatcaacagaccagaactgggagccctggaatgaatgtgtgttagaggaaccattgcctgtcaaggaatatgatattattcaaagatgacttacctatttggaaaaataaaacaaagcattctcatattatatgacatattaaaatatattccacctggattaaggagttatcgaaaaagtgaaactaaaatttaaaaaataaaaccagaaaaatacctgaaagtctaatttgtcttctgttggtgaaggactttctaaacataaaaaaaatcacaagggaaaagtaataggaagatttgactacctggaatgtcaaaaaattcttaactaaattaaaagatcataaattggttacgattgcaacgaaatgtatatgcttaatgtagaaagtgcttatatgtgtgaaagagcttataatatatatcaagctttgtaacatatatcaaaactcttgtcctgtgatttctaattcttcttcaaagactttatatccaggaaaatcatcagcaatgaggcaaacgataaaaagggtctgcccagaaggaaactttgtaacagaaaaagatgtgaaataatccaactgcaggaaccaactcaatagggggaggattgcctaattttcaagcatttctgattcattatgtcaccattagcatagtattcccaaaacgcacttcgtgacatgcaaagatcccaagataaaaatttcacctatgtgtacgtctgcaaaagagaaaaacaattgtcagaatgagcactaaaccttcattgatggttataggagggagtggaattataggacagacttaattttatgctttctcttctccagtgatttacttttgtacagaaaataagccatatttataattagaaaaagaggaaaacgtaactgattcaaaactacatgtacaatatgaattttagcttacaaatttatacatagaggtaaacatcaaaaacggtcatagtgattatctgaagggaagcattatagataattttctacttccttgtaatgaatttttatactttctgaagtctaacatgtattatttcatttttctaataagaaaaaataaacaatgtgccaatgtaaatacaaatcacaaaatagttcacctttctggctgcctgctagcagatttttgttttattttactgcatgtgtggacaagccatttcatgtacttttatctctggtttaagttatacagaagccattctgtttccctttgtaagtgtttcatttaaatgtccaggtgtatgtgggtgtggtggaattaggaggaagagcgcttcgcccccatcaattctgcagttgccgtggcagcttagccgtgagtgggtcaggtggccaaagcagaggccgacccccgccagccgttgctgtcaggccccctctcgctctctggttcaggagaacgtctctagaagagcgtcagtttggggctggatattgtaaatcttgatccaaggaacagtctccagatggagaatggatagaatttctcccccttctcttgcactaggagtaagtgagcgtcactagaagcatccagatatgaaggtaaggacagatttcaatataaacgtgattgaaagcactttgctgaagagcttaatatcaatgtttgcatttaaaaacataatttgctgccattaattgctgcagtttcacatgatgtcagctggagactgttagagttaaaggactgaggcttgttgaattctttaaacagcaagtgcaataaaaatcagggttgctgcttggtaaaagatgggaatttaaatttccccagcacttgtctctcagcatatcaaaaaccccttttcttgcagaacatgttttcattttcatacctcctcacacccgggctctttttactgacttttgttttcacaccatgctaattcatgtcttacgtgcctttttttattcttctgtgtggctgacaaacctcaaagtcagtaggtggtcatggaattgtgccccaaatactgtaagaaaagtaggtgtagagctgacatgtcttaggacaggatctttcagcaccagatacaggagcttccagattgcagaacacacacaggtcataccatctatgctgagcccttgctggcccctggctctggcctgagcaggtagtggcagccagacagcacctgtgttccataaggtgggcttcctcccctacccaggcttgactgagccatgtctgcatgcttggcagccaaggcaaggcagaatgtttccaaacataaccttccattgaacaaatcagttagattctgtctgcacagtggtataactggcagctagtctctgcaggcttcaactgatacaccactatggccagcagccaggcctggttgggccaagtcagaagtctggctgaggcttccagcatctgtgtgtgttaattctgcatttcgtgaacaccatcaggaaaagcctgctcatttgggattgctcattagttgacaaaacaaatgttttgttttgtttgctggtatgagttgggtgctaattgcaagctagagatttatattttaaaatccacatacatgcatctgcatattcttttataaatgatttaaagaggggtaagaagagctattcagaacctgtttcggtttgggaagataaaggattgaatagcaaattatttaggcagaattccactctgctccttgccaatacacaaagtattttaagcacttttacccttcacaaatccttacagtatacctgccaaagtgatagaaagtacaagccttcctgttttttatggaaaaaatgtaggaaaaataagagatggaggggaataaacagtcatcgactttgaatcagctgaaaacgggatggtattctcaaacttttctgtgcataagggttatggagagcttttaaatatccccatggcctggacacatccaagaccaataaatcgcaatctcagttattcaaatttgcaggtaatttcaatgggtggtagccaagtttgagattaaagtaaagaagcaaggttctgtaaacttttcaggtgatcccatcttgcaaacgaggaaaactgcaatctgctttttcacagccatcgtgtgtttcagcaattgcaaaatattctcagactatctctaggagtccctaggactctggtcacatcacctcctgcagcaagttgacggaaggccactatacttggtgacttttctctcatgcattcactttcacctcctagagctttcttttggacccaagaactgtgtcttttacttccaagttattctatatctcatatattagatatgcgttaatacccactctttattcataagagagtggataggtgaattaataaatcaataaaaatagtcacctgatttgttatcaatttatttcaatttagtaaatctttgttaagtgcctcctgtggacgtggcccctagtgtaggctctggggatataattctaagcaagagatcccctgcaaatctatgatgcctcaaagttttacccaaggaccactccatgccccggcccctcatctctccagtaacaggcatgttaatttcccattctttcctctgtttttctaacattcactggtttcatccctgaattccccccattgaaggctttggatctggagaataaaagtgcgtttaaaattgaaccggctccggcgaacacggtgctgaaagggctgcttatttttagcacatatgttttacactagggctacttttaggagtctctctccaactgggctggcttctgagaggggagtacttattcagagaggaatagaacttaatataaacattcctccatccagaaaaaaaaagttaactgacactgggggcaaaagcctggtctccagctgtctataaaactggctgttccaatatctgaactcacagaatccctcccccaactgggagttaatttggagtttgagttgaaaacatgttcaaagttttgccctaaatcagtcagccaacaggtatttctgtgcctgtccttcgagccctgtgctgtacacttaaattttatttcttaggagccaaaaaaaaaaaaaaaaaaagatgaaatctatagaactgattcataggtcgcaacaaaatgcacaggttggtgctcagtttcttcctggctccttatctttctccagatcctctttccttaagagaactttgccgtgattctgcaggtgttttatttggcaatagagagatgattatttgagatgatacattaaagtgggacgttaatttagtaaaaatgttttcaaaaggtcttgacacagatttgctatgtgttgcccaagtgaaagtcaaagatttgcctaatcacggctttgaagaaaatgcctctgtctgaaatccaggcagattgtttatgagctgacctaagtgccagcatagatttccaaggagcgaaatgccaccagttctaaaatgcagggttgagaatactgttagcaaaggttggtgtttaattctgtcttattgtccataatgataccgtggtagcatgggttatctatgttattattatacctcttcaagcctgtcttaaaaccgccccatccaggaagttccaggttaggaaagcgtcttctttttaaactaagcctttgggcttaagatattgtcgagatctgcgaactgtgagtaatggctcattcttctccatgtgtatcttgattttttgacacaggcttcaaatcctacctaaactgcagaccaatctctgaaagcaactttgttcaattgcagcctgactaggtaaggctttgagaatttgtttctgttttaaatcctacaggataaaagaggtggagggtggtctataataggatgaagtggtatataataagtatttaacttaaaagaaaatctaccatttaaaactgtaactagattatttcaaaaataatgatataacttgaagactaaacgactagtgttgacctttgacaatatctgtatagaaatatagcatgtgtacaatgtataatatgtcattacggttcataatagtttcaatttccacaaattcttcttggagaactccagaatgtctggtgttaacttatacaccacagagggctctttgaatgaatatataaactgtataaagtgcccagaagtgcagggggttcaaaaatagtaaggatgtctttaataattttgcttcataacaactgtcttggaataatttttatttacctaaaaataatgtaagagtatgtcaaagtttaggcatagtgtttattaaatgcatagtttgtatcaatgcttgtaagctgtaattaggaatgatatgtggcattatattttacttttgttaatgttcactgttaacttcctgaaatgtaagctgtgctcacgtgaaaaaaaaaaatggatcagtttttctgagaagacactgtaacacaaaaagacctacaggatagtatttgaatagttaattttaatgcaaacaaaaacttctatttcagcattaagaacacatattcttgatataagaaatagaaaatattctagcacatacctgacactggtaaaatatatgtattctttttccctacaacactacatatatttcacactacatatatattagcttttaactattgagtcaaacatagtttaaagtactataatatttccaaattacaaagaaaataatttttaaaatttctctgacagaagcaaacaaaacaatatttttcttaatttctttaaaatttctccaggaatttatacttttgaaaactcattgacttctggatttttaaaaaataatataaacatttaagaagctaccaaaatatgcgaagcctgaatgtatgttatatttatatttcttttttatagttttgaatgattattcacttcatgggcaatataaatttaggagtctcacacatattacatgaaaagtgatttttaaatttattctgtttttaaaaattaactgaatttttaaaaattgacaaataattgtgtgtatgcgtggggtatatagtgatgttttgaaacatataatgcatactgaacagatcagagtaattagcatagacatcatcatttatcatttctttgttttgggagtattcaatttcctcctattagctatttaaaactatacaatactttactgttacctatagtcatcctgtagtgctagagatcactagaacttattcctcctatctggctgtaatttttatccttaaaaacagaagatatggaatatcttctatatgtatctaatctagagttaatgtaagtttgtgtaatcgagcaattctgtgggtttaactcccaaagccagattttaaactctgcttttcccaagcccctaaatcctatcttcaactcagctgcaaatatgtcccaagaaaacaaggctgtgagactgagttaaaaagtcaaaggaaagttctttagagccatttagcaatcttaaagatgaacaatagagtgtaagtacctgtatttattgttctccagtataagaatgttagaaagtaaaagtggagtggtaattttgaataataaccaatttaattaaaatttaaatctttggtgtttgagaattttttttcttttaagtctaaaaaagtttcctgacacaaagcctattcttgtcaaggtgacacttaagttattgttttgaaatggtgaagaggggagagaaactgctgtagaaaggggttgataaaaaatacagccatcactttccaaccaaaagaaagcaatgattaaagctataatgtcagcaattacagtgtgtccaaacaatatttaaaattgagatgggcctctcaggtttgaaactgtgtgtgtgactgtgggagtaaatagtctagtttcccactcttcatgtgtaaatagacacaaacaggtgacttttcagagcctgggacagagaagacgaccccccagtggagacgactgaacaggcccctcatgcatacagcatgccaccagtattgcccagaaatactgtttgtagaaaatcggaaaggtagccgggcccggcattaatgctagggtgtctgagatgagtcgaaggaacagctattctttttccctttgttatgtttcttccatttccaagtggatgaagctctaactcaacctttcatttgtttcaagagggaggtatcagaaccacaacaaatggaatgaaacctaccactaccacctgcctggcacaaagaaataatttacaattcacggggaatttcctgtgtttcattttgtctgaagaactgtaactggacttgaatgaactaagtgtctaattgttgcattatttttcttgtagagattttagtgttttattactttctccagtttacttcaatagtgaattaggttccctctaccatctgaaatgttacagttcgataaaataggtaaattaataaagtctaaagtgcttccaagctgagcagagacctttctgtgcgctgtgcttttattgctcttcccagctgatatttataactgggccatatgtggttataaagatttattatgagcctgtggaataagttctgttaatgtgtacagtaaatgtccaagttttgactctgtaagccttggagatttctaataagatgaagccattttgatcatgagccaagcagtgtgcacttggagccaggcctcgtattgacaaagggcttagctatgtgctgtagactctacccactctctgtgtgggtttgctaaaaatgtttgcaaagctcaggtaggtatttttcttcctcatcaccatcgtcatctgagaggggttgaagttggagaatctactgactaaaagttgaaatggaaaattttaagactacaaataaagatcagactaaaggcaaggcagagccgccctgggagtacagtgaatggggcatctgtgtcccactcgggcgccgatcgccttgtccagctactgaacagttactttgagtgcatcaggagggagaaaattacaggcacagctggcatgaatccactccccatccatggccagtgcaaaggagacaagacactgtctcttcacttttatacacttacttcattttgtgaaacttctcttgcccttactatatgtgcatattgttcaagtgaatacctgccagttttagaagagaaagggttagtctgttcttggctgctacatcaaaataccataacctgggggcttataaacaatggaaatttatttatcacagttctggaggctgggaagtccaagatccagaggccagcaggtccagtgtctggtgtgggcctgattcctgcttcatagattgcatctttttgctgtgtcctcatatagtagaaacaacaaatgagttctctggggtctctttcataagggtactaatcccattcatgaggctgcaccgtcatgaccgaatcacctcccaaaagcccacctcctaataccatcaccttagggctgaagattttaacatatgaattttgtaggagcataaaaattttgtgaggacataaaaattgttttatttagagcccatagcagtctctcaataaaacaatagagtaggacagtgtcaaaagctttgtaatgtgtttctcaacctcgagagcattacaatcacttggggaactctttaaaaatactaaaaatacacagtttatccccccttccccttccttgagttctacctgggtatagttttgtttttgttttggaagttcttcaagagcttctaatcggcaaaaccactggtctaagaacctcttctagttctgacccaagagttagagaagtgacttttcatggatgtcacatgagggaaaacccagggccagaccttgtcgtgaggttcctgcacagcacatttccccttttctgcatccccttctcaggtgctcataactccctgaaggtccagagccttctgccatgaagggcagctctacttgaataaaaatctacagactgaacttttccctccagtcttttttcccgcagatctgcgagatgccatattagattggtcctgattaattaatccaaaagtatttctatttaaaaacaaaaaaattaagttttttttttttttgaaaccgggtacacaggctggaatccagtggtgtgatcacaactcactgcaacctcaaccttccgggctcaagtgaccctcccacctcagcctactgagtagctgagactacaggtatatgccatcatgcctggctaatttttgtattttttgtagagataggatttcgctatgttgcccaggctggtcttgaactactgggctcaagcaatctgcctgtttcggcctcctaaagtcctgggattacaggcatgagccactgtgctcagcccaaaaacattcctatatgataatttaatatatgagtctaatgtcattaacatgaaataatttttatatctatccaaagtgagcaattgataaagaatttcagatattcaataatcctagactgattgacaccagataaattctaataatctttctggctgtaccttttcaccagttatcaaatgattatccatcgtttgaatagaacattcagggaggatcctagtcatagttggacagtctgatacttcctgtgaattttctttccaagacttgtctcagatccatccatcctccccatttccactgccattgtcccctgtccaggtccctgtcctctctagagtaaattatcaaggttctactacatcctcctgcagtaccaggctccatgtgaggtttgtcaccagcttacgttggcctccacttaaagcctttcaatgactttccattgccctaaaaataaaatccaaactcctggccatgccacggacattgtcagatcttctcaaccccatttgaaactgctccctggtctcaagcacgtgtccgttcttctctcagcttcctgatcagcccaagctttctcccactggagcttctgtccatgctgttacttctgccgagcatgctttctgcccatgttttagccttcacatctctgattaattgcaacctcttcaatagtactctgtggttactctgcctaatgcaatccacccctttaccatctctatctcagcctgtggtttgctccttcataacacttccatttgcaatcattctattcattttctttatttggccgttctctgcttgtttcctccactgggatggaagtcccttcacttcaggtaccaaggccttcaccattttattcacagtgcctaaaacatgcctggcatgtagatggtactcaaacacaaatgttaaatgatggaagaaataaaaaagaaaaagatctttcttttctcctggcctttaacttggcaggctttatctgctcttcagagtcactgagatgagaaccaggtggcaaactctgctttccttctcctccaggcaacgcagaggcattcttaactcttaacctgcagactttgaaactaggcacagaactccagaggggataataacaccagcaaatgtttagctaaaaaatttagccatacatgccacacattgtgctacacattgagctctttggtcctcacatcaacgctgaattaggagctatgattatccccattctttagattagtaagctgggtatcaccaaggagaagtacttgccccaaagtcacatggctcatatgtgttggaagcaaggtttgtgacagatcttccatgttaaaccattatgttatcctccttaggagagagtatggttttatgaatatactgctccaattggctgagatgacaatactagtttttaatcggcggctgtgacatattgagggcttatattaagaatgcgagctgctccaaaatgtccctgtcctgcagttgtacaatcacatatttttaaaccaaagtaaatgattttacatttatttctttctaaccgcaccatgtttatttcagtgtctctttcctcaaatccttttgcatatcagtggatgtttagagtgaaaggggcagggattttagagcaagacaagcctaggttcatgtcccagcatcacaggttagggatgtgtgatctggaacaggtgacttaactcttctaaactttggtttcctcgttaggaaagggagggtactggtgcatggctttgtgggagtctaagagggtggaaatgtgaagcccattgccatgtgcctgcatgcggggcctgcaccagctcagttccgcattcctcgccccacgcattaactagctctctctgctgtgttatctgagatttgtacactcttgattcttattctgtagttttgttttgagtcatccatcaagtactgctcccagaggtaaaaggcttttctgaaaactgtctcttcccttacagactttcctttatcccaggaattgactcacatatttgggattgtaattgtctggatttgtaagggatatgagtaacattacccttctgcagcttggattttttcttttggtggtgttaatagcatcacactctgtcttaagcctcttggacatctgaataaatgttggcatgaaacctggtaaaatgaagcatgaagatgaatgtgtttgtagaggtgaagaagacattcagagctgggagaagtgaaagtctatgaattctcattccatgcccaaaagtgacctcattcccagaacagtcagctgccctactcgtcatgactttaagactcatgaaaatgtctcatatgggaaagctccaaagactgcccagtatttctaaactttaacgggatgtaattataacccatgtataaggccataaatactttagaagtctatctcatttgtaccaaataatttatctgattatagttactcactgtcacctagctgaagtcaggataggtaagctttgatgaaagaaaaaagttatcccaggagtaaggcaatcagcgaaaaaaagaagcatggaaaaaagtccaaacatagaaaaccaggacaagtctgattgtaagatggcacagaggggcttatcagagcacccagtgatgaagaaccagggtaggaagaagttagaaagcacagagggacagaagtataggctgtaggtgtggggaggctttaggctaagtacttgtctagaaggactcagggaagcataaattaatacagaaaaactttggaaacgtttctggtgtctacttatgctgataatatgcatactctttgacataacaacttcactcctgagaattgtgtatttctagcagaaatctatacaaatggtcaccaaaagacatatacaaaaatgctcctagcagcaccacttgtaatagttctgtattagtttgctagggctgccataacaaagtaccatagaccgggaggcttaaacaacaggctaaaagtcagagatcaaggtgccagcagctttgggtctgaaggacacaggcgctgagagggagcgtctcaggtaaagaagaagaggggaaggtacgccacttgaggattctctgaccaagaagatgagaagatggagcaactggaaagtatagttattcttttgctaacaagaaacaagaataacaattaaaaactccaggacaaacaaacacacaaaaactaaatgaaaatcattctccaaatagaaagcaaattaaaaagtggcatgattttaatcataactatgaacaaagcaagaaaattaattttcatgttagtacaaaataaaaggtaaacactaatgactttgatcatgtagaattagagctgatagaaatccttggcaaaggagatgtggaaaggtggagggaaggacagaaaatagccttttcttgtgtgggagacatctgtgtcaagttactgataagtaataaggcattaattgactaaaattaaggataaagtcataggaatatttttaaagcctttcatggtaaacagaagaaaaagaatactaaaagtactataattattgagcattgtgaggaagaagcaagcagaaagaaggcattgagatacctctcatagtgaaaaaccaatggatttttgtctacctttgttaaaattcaagaatttaatgagtcatttgttaaactgctggaagcttgagattggccatgatgggaatatttacatcccagaaagtgaaaaaacaaacagattagaaagcaaccatgttaactaaaaacagtattgaaaagtgaggcaggggcagggaggagttagcagaaggagactgcctgttcttttgttgctgagtatgtatttttctatacatacgtaagtatttattacgtactatttatttctattatgtatgtcatatttattatatttatcatgctcacatatatttaaaacaaacactttaaaacgtcacaaataacacctaaaaattgttaataaatatttttgagagcctgcaccctgtgtgccatcatggtagccaaacatgctgaataccttctctgtcagagcctacttgaccagtggtgaataagacaggtcattggccagtcacaccatagtgttatggagggatgcgagcactaggggaggcatctattcaaggcattggaaatgaggtggggctccagggtagggcatcagagttaatgacaaatgggtactggggaggcaacagaagtctttgtgagttaagggtgggtgggaggaagggacactcttctagcaaaatgaagcatatgcaaaggtctggagaaaagaaagggagtggggaccagatcaggaagataatagtgtaaagtgctagggtgaggtcgaggcatcagatcttcaaggaaaacaggagctctggatattttagagcacttgatgggacagattgtcatagagaaagactctgccaagttatttacactcctacatgctgtgtcagtgctcatttttgaaagtcatttactacctctgaaattggaatgcattctacaattctggtcaaccaggcagtagtaaagatacaatcgtcattcctgaacatgctctgcaaagttgtagattaaatgtctttggttagaagaaaaattgaagacaagaatgaaagattctttgaagaactgctgtattcccagtgttctcagtggcacaggggatgatactgtgtggaaaaacaaaccaaccaaccgcacaagaacattcacgtctctgtgtcaaaaagtgatcccgaaaagtcaaactcagaaggcaaacaggttttcaaaaagcatcgacctatttacttaacttatatttacacttgcccatacatcaaaaagtgatatatgttaaaatctatgcctaaaaaatctttaaaagctcactaattataaaaattctaaggaataagaaataattgtatcaaatgtaattgctaacatttttcctttagtggcacataaaattataattcttctaataattgatggcattttataaatgcccataaaaatatggtgcatatctatattctcctttataaaaatggaattatatttctcataacctgaataaatatatttggactcgaatcacattaacagcaggcgttgaaacaacaacaaaaatgtatcaggctaatctcattcgcaagaacactcagtgggaatacttcattccgtgattctccatgttctgtgttgagagttactgcaaacgcttttcagatggtgggagtcggagggaacttggcaaagaggctgccccatgcaatccactccccatttgttcctgacagtgtgtatgggagaatgaaggttctgtcccacttgtatgctttttatttgtgaaacaatcctaggtctttgtgttccttttacctgattcccaaactgaacaaacccaagtaccaaccattccccttggatttttagtcaactgaaggttcagagagctgctcccttggggaagaggctgtggacatgacatttgcacatgcagcatatcaacttggaataatttccccctcatgtggggtctactcccaaggagtttattctaaacccaaagtacattagttgcctgtggcaccttagaaaaataaactatcctggggtccctggttttggaatgtcatttcctttatgatatgtgtctttgaaaggcaaggagtggcagtaagcagagtgatataaacatggggcctgggctttaattctgtctgccctcatcctttatgaggcgcatgatttagagggcccaacttaacttctcagagctttgatttctccatttcaaactagaggaaagaatgcttcttttgcaggctaacactgaggattaaatgaggtcacacacataaggcatattccacagttctttatgcagaaagtgcctctaaaatggttcctgccatttgacactggaagcaagaaagcaaagaggctgagcaaaatacatgatcatgcactcttagtgatgggaaaagacctttaaaaagttatctagtccaatcttcattctgcaaaccaggaaagtgcaatgctggcctaggcaaggactttcataaggacaaaagagaattcagtggccaagctgggttgagcacagccctcatgccttttggcttaaagctttctccatttgctttgcagaacttcctataagtaatagaacaaccacagatggagtttgaccagctggattttttttttaatatcacagcctgaggaaatgtggctcaatcattgaatgtttctgatgtggaccaatttcagtcaaagacagtaaaaacagaaagcctcagctttcttcttattttaaattagaattttaaatgtaaagcttaggtgaaggaaggatgggaatttgaatttaaaaggctaaaagaaagaataccaaagaattagaagataaacattttgtctttcaaagggaaataattcttcattctgttttacagccaaccataactggtaagatgaatgacgctttctgttagtgtcatgcttttcaagtcacataaaaacctggttttgcatgagaggcgctgctgaagcagcccttgtctgtggctgtgtctcattctgcaacacatagtgtcccaattttcactggcttcctctggaactgaagctgggtgcacaggtttatcaaccgtctgactcttacatactaaactcccgccttcccagaggggaacacctctcattcccacaactccccaacccagaccacccccagcacgggctggatcattttgaccttggacaaggtggaaagaatgtcatttccaagagttccctcgcttgtcttccatctccataaatgttgccatatctaaataatgcttatacttttgttcattagtttttaccataactatttttattaggttcctaagtgataagatcaggacaaagacaggttcattatgctagttagacattttcctaaagtatgataaaataaatgaaaaggaaaacaatacctgtttatctgagatagaagaagtgtttacaagttgttatgctgcattctagttgtgctaggggttacagggatctatacgtgtgtttatgctcacgggatgtacaccaaaaagaagtcaattttactgtatgttaattacaaaaagaaagctattaaatcttcctcaaatcctagaaaaatataagtacacattatttcccacacaaactcttgtgaagggttaacaaaactcatctggctttatttcatgcaagacttagaaaggctaatagtacggaactgcagatcaaaccatagcaagtcgtggaatggagggcaacatcttcaagtcggccagggcagtacaggcaatgagtgcagctgctggggggcggtggggggcgggggtaatgtgagtctgcagggccccaggatgccacagccccgccggagcagtccctggggaagcagcgtttcctgtccctcgtggcctgtgaggtctccctcctgttctctccctgtgatctgctggtatttctttttgaagacttaggttatgaagtcttgctttcagaaacagaaacaaaacaaagcaaaaacaacttgatagcattcagcacaaggtaaggcaactccccactatgatgttaaattgggtttttttttttttttttcagctacaaaaccagagtcatatatctgatggactcaggaataaaaaggagtctggattaagaagagtaaagatagattactgatgctggcaagacccaggcagactcattctgtgcacactatctgactgtcccatttgcagggccagatgttttctctttgttactatttttgcatgtgtctaggaaacatttgggtggcactcaactcacaagacctgaaccttgtagcagatgctgcttcccctgggtgtactcacttctacatgctgaagggggatggctgctatggcttgagtctctgcctagaggcttatttctaggccacaaggcaatgacaaacagaaagtttatagagaaatatcattttttgtttgtttgtttgagatggagtttccctcttgttgcccaggctggagtgcagtggagtgatcttggctcactgcaacctctgcctcccgggttcaaatgattttcctgtctcagcctcccgagtagctgagatttacaggcacccaccatcatgtccagctaatttttgtatttttagtagagatggggttttacaatgttggccaggctggtctcgaactcctgacctcaggtgatctacctgccttggcctcccaaagtgttgggattacagcatgagccactgagcccggccctagaaatatcactctttagtctacattgtctcccaaagctccccagaggaactgagcttccactacccacagtgcttgttggcagaccttttgtagctttctgccctatctcacaggatcctctttccctgatcagaaatgtctggggttatcttccaactaaacttcttgctcttgaatctgggcctcaggttgtgtgtctggggcaacccaggcctaagatagctatgcatactaagcactcacccacagaaatacacacacatgcatatgcatgcacacattcactcacatatggatacttgcacacatgcagacatatacacacaagcacatatatgctctcctgaacacaatattcatgctctctaattcccacgggtcatgctcctggcatttgctacagaaagggcagcacaagtgctgtgatccctccctcaaaatacttgcatctggaatttggctccttttctccctgcttaaatggtatagtgcaggtgataactgcgtagataaacctttatagttagaaagagtctaaatgttggtgtctgtaagcacaataagtaaatgagtttggtttttccttccaaaataactgaacgttcactttaaatataatgttagccagctttgaatccagaatatttacatcttgcagactgtgtcttgcagcctctgaatcaactgactgggagcatccgtctctgcgtgcagggctgctgaaaggtgggagcagagataaaagacaggagatgggaagaaacaaagggagccaagagatttcatagaatgctgcaagagacattcttttgatctatttggactcctccaaggcgggatccagagaaagaagagtggcaggttggagaccacacccctagattagctctcctttgaactgggatggtggaactgccattcctaatcagaaacatgaccaggaacgttggctcgtacctcccagatgtatttgcctgctggcatgatcaaccacatcagaattttaaaaagctgttgtactttgcattggcttttccctgttttaaactgctgagcatttattgaaggtttactatgtgccaggcagtgggataaagtcctcttaagggagccgattcaagttactctcccaaggagctctccaggagagctgctaaaatagttcaatttatgaatgagaaagaaagcagatgcttaaaaggattaagtaatttggtcaaagccaacaggaagtgcctggtggagacaagatttgaacccaggtctttctgagtctagagcttcaaatttaaattacaattccagctgcctcttgaaaagcagcccactccttctccctgtgcaccttagcagccctgtggaatgtacagtctctaaagagcatgcctgttaaaaatggctacagtgctaatagacgtgctacatatggggtatagacaagacacattttctggagcagctgctattgctcaatattgaaatgtcattttcatattaaagcaagtgcactgtggctgctgctccttggactcatatcttttggttctaagtttgccctctttccagtgcatcatcttgctagtaggtagttcagcctcctcttcctccttgcccagtccttcttcccttcatagttctttccctatcctcaactccagtttcacaaagaacctgttcatggttacacagcccacaggtgtctttctattatttagaaacatgcaccaggacaagggcacaaagtgagtctgcagcctctgctacccaggataggctgcatcctcctgcgcaatgcccaccatatgctggatgctctgcgggccatggaaaactccagcatttaacatggtgggtgtgatacccgacacagaaatcactattaaacaacaaatggcatttgtgaatattcaattgcaatgttgtaagaaggaacatgaaaggcaagatttggaaacaggtttggtttgggcaacctggaaggctcctggaggaagtaacattgaacaagcctctcacggtttggttggtggaggaggcaccaactgaaaacagggttgtgggttctagttccgtgattcctaaccctggctgtgcgtttcaatcactgggtggatttttaaaaactgcccaggccgcacctgagaccaattatattgaatcactggggcgggcttggatattcctactttaaagctccctgtggacagacaatggacagacacaccagcaggaggccattccagtcctcaggtaggacaggtgcagaagtgacaggaaagctgcagggagtccaaaaacatggggcaaataggaagtgataacaaatcagagcctaggatagcttggataacgagttgagggaggatgggtcaggcacgactcctcagcctgagtaacagacatgatttggattctgtttgctaattgatttagttacatccattatgaaaatggagagctctcagcaagaagctcacctggaactacagtaaacagcactgcttgctctgggccctcctttctgctcggagcgggacttgcctgtaattacctccaatgtggaaagaaaaagaactttcacatcctgactctaaaattctctcttcgccccgtgtgtcagtacataaactttaattcagacattggcagtactgtcagcagctcatatgtcatcagcggagggctcggaggctccgcgtgccagggagcaggcggcttctattgccttcctggaggtcgggatccccctggtttgctgaaacctcaaaggcaagtctttctcgagggcgagaacagaacctgaaagacaggactttgcctctggtctctgttcagtggctgagcagtctagcccaggtgtcccactcctagtgggacgcagatgtctctttgcacacctgggaaagtgtgtaaccaagaccacgtgaggcccggggctggatctctcagggaccctgctgacagcccacgagcccagggggtcgacttgggagaaaccacagaatattacccttgctctgcatggatacaggagctaacaacaaatagaagtgcagataggaaaactcccttcccatcctccttgggcagtagcctctcctagcctacctctccccataagctatctgctggtgtctcctgggttgcctgaggtagcatttagaggggttggcaaatgccaccatgaagagcacaagcccgttctccataggagctggcctcttaggcctgttttctcctatctctcgctttcgctttttgaaatgtgattctccctggtagggaaaggcaagaaaaacatccaatgctcataaaagttaaagttcagcacaagctgttaatgaattgaatttgcttcacacatacatttataaactcaaaacagacctggcatgtccttacttaacttgtcaatgggcaatgggatgggaagcctgaactccagatggacatgcgtaggccatacaggagctgaagaaagcatccaacaaaaccatctgaaaaggtttttcaacataagatggtatatagctagtggaaaatgatgctgaataaaaaaacagaattatttttaaggttttgaaaagtctcttagatatgaaacagccttggtttggtgctatatagtttatgagcctgaaaatgaaattacaggacataaaatataaaaaaaactaatcaatatcacataaccaggaagcttggaaatttaaaggacttctcttgtgctgacatttgaggccacaaataccagaatacggcatatgcagaggaagtcggtgttcatattatgctcaggttaccttggccaatgggagcatttcttccatcagctcaattgtgaggcctggcatccaagacaagtattgatttctgctcctttccctgctcctcctccttccccttcctctttttaatagcaggtaagcttactgttaaatgatcaattccttcatcatgtgaaacttgtggatgcttcctagtcttaaacatgaacagtaaattattaagagacattatgttctctgaagacaccgacagaaaaaaattctccgtttccttcattacaggagatagcttgaacctctacctatctgtccctctccacactcctaggtctcaggatagcttttgtaggttgggactttggtgaaaaggcttggcagcaaatttcaactatcacagtatgaccttagacacgtcgctccctaaacctcagttttctcaactaaaagtggaggtagttctctactcaaatattaaacccttagagacacctagcctagccactccatcagtaatagcctatctcccctctttaaaaaaaaaaattctttatctcttttatgcttaccattgacttctttctttcttttctttctttccttctttctttctttcttcctttctttattctttcttctgtcgctctttcccttccttccttccctccctctgtcctttcttccgtccgtccttcctttctttttttctttctttctttctttctttctttctttctttctttctttctttctttctttctttctctctctctctctttctctctctctctctctttctttctttctctctctttctcactttctttctttttgagatggagtttcactcttgttgcccaggctggagtgcaatggcatgatctctcagctcactgctacctctgcctcccaggttcaagcaattctcctgcctcagcatctcaagtagctgggattacagccatgcaccagcacggccggctaatttttcacttttagtagagacggggtttcaccatattggtcaggctggtctcaaactcctgacctcaggtgatccgcctgcctcagcctcccaaagtgctgggattacaggcatgagccaacgtgcccagccattatactgtatttttgtttgttgatttgttaacaatagaagttaaaccctgtgagtgttgtgttctcactcttggaacaaggcctggccccaaatagtccttagtaagagccagcttaatgaatgaatagtaactcaatcaataaccatgttttgatgaaaggaggccaggatcactgcaggggatggtgacacatatgggcagagaagaggaatcaaagcttacaatggagaagtgaaaagattggtcaaagagttaggagctaatcagctgaaagtagtgtcatggagccgagtgtccatggagtcatggacactactgaagaaggagttgttgagagacccctggcttaagaggcattattctggcccctaggtgtgcatccaacattggtgagtgtttttttttttttttcttcgagtgcttgttaggtaaaaaaaacgaagtgctgcggagaatgtagcaagaatgaattcaaggactgtagtctctgggaaaagtggggcaggcatggctgacacctatatcctgccagccccctcccagtccacctgctctgccatccacattcccagtacatcaacagctgcctactgcaaatggcttcttgtgttctctgccagagggttttctctgacttgctccttcacagacacaagcgacttggcaggtcaatggcactaacacccctgaaaacaacaggtggtggatgggagtcaccgggtcaaggccccaggctccctgtcctctggtgggcaaccctgagatgagtctatgagactcctcagagtttcctgggcagaaagcagccagccctggtgcccatgctgtaatctgctcagtcacacatgtgtcatgggcctttctccctgttctctttaccctccttcctccctccctccctcctctgcacttcaatccactgcattccccatctcacctcccagaagaggccacctacccatgttcttgtcttgggcctgctttcaggaagacccgcactaaaccgaaactgatagcctagggtccatggcattaagtcaggagcacagaattaatgttgcccaagataaggatttcatatttctggggaggatgagattactctggcccataatggttcaatggaggaaagatttttatggcaggcccctgaaggatgagtaggattttcacagtggtatatggtgaaggtatatagtggtatatgatgagacgaaaggggaaaatgtcaaaaaggagagaagatgaggaaaagaggccttagagaacagaaacttgatattgtggtgaagaagtcagttgatatataaaattgaagaaaatcctggaaatatttgttgggggtctgattgtaaagggtctcccagcttagctaagatttaggaacttgaaccctgggaaactgggagccatagagtttttgaacagtggtttcacatgataacagaagagatttagcatttgttggggagggtgggatcctggtagacaagagagtgaagaatatatgttaaggttctgcatagggtgatctctctgcaaacgcacagagggttaaacctgagggtctgtggtggggaccacaatgcaccacccaagtcccccgttacagaaggtcttgtggtcctacctgctaagagggctggggcagacacccttcagctctcaggagtttcagggtaggggaagagctcagagaaacacctcgccccaaaccatatccttttccagtggctcatgtgtaatgactggtcactctgggagtatcaagggctggccatctctgcccaacttgagtcaactaagaaagaccatgctagcccatcactgatggctttattgtccaagactgaccctgtgcaagcctcccagctcccattctccctctgcccactgctgcttcctttccctccttccataggcaattgatgtgttttgtttcagatatgttgagtttagctctaaaagctctaaagaatctgggtgattcagtgttccctaatgtaaagacaattggttttaccctatttcttcttgcaacagttctgccttcatggccacagatcaagggactgcagccttcatctgagccaatcagaatccttcactgggatttcctaatttgagaggaagagtcattttcttttctcatactgaagttgctgatataagctccagacttcctgggggccatgtaggtggaattccaaggtgcaccctgtatgaccctctttgctccccagtgtgagtgagacctatgaatatgatgggatgttactcctgtggtcaggttacattacacaacactccaccttggcacactgcaaaaagagagggactcttctgttatacttaaagagactgccacatcagagagaaagccactgagggtggcctccactggccgagagtggcctcgggctgcagccagcaagaaaatgttgggtaagtaacagcttctccatgttgcttgtctttgcatgcctcaaccttccttcttgattttctcagctgtgcacacactttagtagagagtcacatcattaaattctctttggttaaaacttttagagtacaagtaaatttcctaccaaaacctgaaatgatccaaaactcatcacacatccatgtggggtgagcatgaatctttgtccagaaacttgggaatgaaaatcaagtcctggaacttaattttctttttttcagttaaattaaatgtgactctgggatgcctgagattggctggcaagaaacccagtgaaagccattgctgggatctctttgcacccctcaggtctgtacaaagattgcagaaatatcatgctcagcaaaatatttgtaggtcccctctgtcttcaggttacggtggtcacctttgtgattcctactaccagtgcacctcttgaagtctggaggtcccgccatgctgagagcttggccagcttgagccctagggcccaagtccaaccttatgaggtgcccccacaatcatgctctgtcttccaaaggtcctgtcattctctggtcccaggggccaacaagggagtgaacaataagtcctcgccactcttaaaaccctagatgtcttcctgctctcagtctcaatttagatatccaattttgacgctgcctctgtgagtttctcttgagttaggaaaggttaagggtttggactggttccttggtgaagagaagaggagaaaatccagaaagatcaaaacacagaggagattgaatatcaggcttgcaatgcctgatgaaacttagacaacccacagtgtactctgttacttttggtaacttctgtggaaccagacagtgttctcgctttcttagaaacaggtattgaaagagaacaatagctgctgaacccagcaaaccctccatatggcagggcactgtgggaatcccccagcctgcttggcagaaagaaacctgggagagttcacagacaagccacaaagatttttttccctgtcttcaagaaagggtcaattcaagatttgatttaaggatcatttaatggcaccaactgaagatatgcttatttaacttaattccattttttggaatacagtttatttaatgttctttcaagcggaaaaaataagaaacaaataatatttgaaaagtagacttctattttgaaaagttacatgatggttaaaagtttctcctcttcattctagggacagtagagaacaacccaattataataataattttacttaaataccattatgaaaagatttgacaggaaatcactattaggctgccattactgataattttaataatacttaaagaaagctgtgtgtataataagcattacacacgtatgcattcaaaggctcttttattccatgtggtctatgctgactaggtcagcataattatgtgacttggtctccagagctaaagaaaaaatgcagtttaaaaaagaatgcagtttctcaagagaatggttaacaaatccgtaaaagacacgaaaaggcagagaagttccacactaaatttcccactctgattcttagccttttggaggggacaagtcctagtttctgccttcatagaaagcaatgtgggaccgcagatgggtggccactgcacttccttctggcctctggcagtggggtggggtggaggggtaaagagccaggggcatttttaatgtaatttagtccaccttgccagggtatgaaagaaaactaactttagcagatctagccatgtgactttggacaagtcactgaactctctgagacttcattttccccatctttagctctaattatctgtgatttgcatgattccacctttcaaagaacatagagcacggttcaaaaactttgaagttagataagctgattcaaatcctaaagccagcccttgagtgctgtgtgaccttgggtaagttatagaacctttctgggcctcggtctctttaccttttaaatgaggccaagtgtgtacatgatgctaattaagtgagacagtccatgtgaaggcttagcacagtctctggcattcaataagaacacagtgagtgagttgtttttcttcctgtcattttaggggttgtagcaatagtgtttttgattgcagtgggttgttgactgccaagtgaatgattatacatggacatggaagttgagatatgaaaaaagccacgtgggtcagagtctcatggtcagctaccatggcaatcctgaaaagctcctctacctgaatggcctgtcctgcaataactcccctggagatactgttccctttctcaaccttggaactccacatattcaaccagttgagtcaacccccaatggagtgagatcaggcatcttcagtgaccttaaaaagccagcttgactctctagccaagactcagagggctggagccaaatcagaatgactaagatacagaaaagaatgcgtggacggaaagctgcagttgcagcctcggaagacactggtagaaatgctgttctggagaacgtgtgtggatctggtgggctaggcaccccaggcagccccctggcctgggtgaaacactcctgcttgctctcccgtttaccaaggaagctttgggtaagagcgtactttacctatccactaaaaaggcagaggaagggagggtctagtggtctgacacgcatctactaggtagaaatgggcaatgtctcccacatccaagcatcttagggccttagtaagaggggggtgatctctgagggcctggccatgggctgcccttaagacaagtggctggccagttggccaagtggccttccactggtgacataacaccctggaagtgttccctctgcctttgttcccttttagtcaagtagtggcacccttaatagagagaacaacactgtggtgtgaactgatttgtcatatttttgaccaggccctaaggaaggggtcagcgacacacttaggaggaaaggatgggaatattcactcctggtgacagtgagatttggggtctgatgacggatagtttcccccaacttttctgctcatctaaaacaataaaacctctgcctaggttttaatcattgaaggaaagctaatctctgacttgtcctgttttttttgtttgttttttgtttttgtttttttttttagatagcggtgtatttattgcatgtttcttactgcctttggagggattacctgtgcagctaagctctgactccttaggaaaactgagcatcgaaaataataagagaaaactgtaggatattgaataacatgacagagggaagactgcagtggtcttttctattaaagtaaagcaggactagtattctacattaatgtccaaattatgcaaaaacaataatcagtgctccgtgaatgatcagcctaaggattagttatggtgcacaggggttttgatagggcattaggtttcatttccggaccaatggatgaacattttaagaaagtgctctttactctgtgttaaccgcaaataataacaacgctccactttcataaggtggattttaactcttgtggtaatactggtgctctcgaagtcaaatcatcactgccaaagagcttctccagtgcccattctttccggcactgccatggtcttcacgagctctttatgacatcctgagccaaggccaaatcccctcctgggcgtgcacagacctgccccacctcctgcccatgccctgtgccgtctcttaagcctcccacccatgccccttcctgaagtcaccctgactgctctgaggttcccatggctctttctttgtcagctttgcagatgagggcacatcagtgccttaaggccttaagatccttcaagcacatggactatgacttcgtgcctctcttgttctttctggtaaccaaaggtactttgccatgaagagaaaacaccttggtaaccaacgtggctcttaatcacatcctgcactttctctctttttcttttctttcttttgtgtgtgtgtgtgtgtgtgtgtgtgtgtgtgtgtgtgtatttagtatttctcagccgctggcatttaatccacccagggggcacctgtgcttctgtatccacacagggtgctggagacacccttagggtcaatcgacatgtcccctgtgtccagaactgcccccagactgcaagatgcatttccctgggaaaatcagaaatgatgtattttgtcccaattcttccctatatcaagcatttaggggccccaagagagacccacatagaagtacttccttttctttccctgttcaataaataacattctgaggccgaggacagggagatgtggagagcagaatccaatagcggaagccacccagactagataaacaggagggggcaaatgaaaataagcaggtgaggaggaggctgggaatggccaggagggctaggggtgtgtggcagggagcttggactgtggacagctgctgagcagagcaccaaggccaggcacgtgtgtcactgaggtgaacttcagcacagcagaggttctgtccttgtagggggaagggcccaacctccaggacaagcagtggacctagcagttaccatgttcccactcagtatcagagacgctgctgagagcttggcaccaacgcttttcattctgacgagcacccagcccttcggattatccataattacacttgtgtatatggaggtaaaacagactcagagaggttaagcgcacctgtgttcccatgttactcagacaaaattgaggttggaattcatgtttgttttcggtttttgctctttctattgtactggtgcttctcgaattgctccgatgtgagagaacctggatggtccgggcattctttgtggtgtgtgaatcatgtggaaatactggatgggtcaagcttacaatagctgaatatacaattccatgttaaatcagataccaccttatgtacactccatttaggaagtgttcaatgacttttacaattacaggagagaaacagaaaaactttgagaaaaatctattgatttgatttttctgtgtcccaggaaaaaggtgatctctaaaagtgagtaatagcagaagccccatgtccagcttggggaccactatgtcttcaggaagtagagtcagagaccatcccccgctcggactccggctctccactggagagcagtgaggaggtgagagtcccctgccctgcctccacctccctcaggtccctctggcttgctacaaatgcccaccagagaagcaaaacagtgatttttgttttagattttatcatttcatttttacataagtcacccaagcttcttgttaaaaattacaaaacacagataagccaaaaaatatatataaatgaattagttgtaaagattctccactaatactcaccagcaataaaaatttggacctgcactcattcagatacttactttctgtgcatgtccaggctgtagattttttttttctggcatgcttaccgttctacatccattagttcacagctgcactagtgtttcccaaagatgggttcccacgacgtatacagtaacattgtccaagatacaattttaaaatgaagattcctagactctttattctataaaatcagcatcttgcaccccaggcacactgacagcctgcttttaacaaacttcctggtgattctcacgattctcacagtcctcatttttattttgcccaggaatacttcaatgtattccagagcctgatttagttactcagagccctactgatagacacttaggcaattcctgatgtttttctcaatggtgtcacctatatcagtgtatacattgttttctttgaacaaacacctgttagtggagttgtaggattatggactcactggtatactgatacttcttgtatgtgttgactgttgccctctgaagcaggaatagtgatgggcagaccccagttgcacccccagcaggcaacacagtgttttcagctcacgtaaagatctgaagtatcaggaggacgtgctgaaagctgagggctgctgagataagggagccagcctttgtaagtgtgaagcccagagatgaaagccaactcaagccatgccccacatgcactggacctggtcctgcccactagagcagtcacccccatgacccctgcacctgccatgcaccgagaggctcccagagtaatcactcccacactgtcgtctccgtgaatgaatcttccacggggagacttcagaggggggaggggggtttgtaggggaaagaagagcagccccccttggcacctccgtggttggcttacacaccagacctggcaggggtggatgaactttcacacatcccatgtggcattcctttattcagcagataaaggttagaacattcacctgtcagcaagtatgatggatgctggagccacagtagcaggtgggactcagtccctgaccttgagttccttggacttcatttggggagactaaattatggaacaattagaatgccacatgagtggaagtgtagcagaggtaaggcttattatccagggacacagggaaggagcccagacctcctggaggtcccaggaaagtcatcagaaaggtgacactttctccatcatctgaaaaggaaatgtttttaattatgaaagaagtacacaattgcaaaaagtctaaagcatacagaggcatagataaactttagaaacccaacacatcctcatttccctaacataattactgttaggttctggactctaaaaatctatattaaaaagatatatgtgtaggtatatacataatgagatcatagtttacaggcttttccttcaactagttttctcactcaacagtatagcatgggcgtcttctcatgtcaatacatttgtggcctcctttcacaattatttcagtggctgtagagtcatctacatcacaggtgttccatgaggcatttaaaacgatagcactcatccttgctttgattagtgttgtattatggattttatggccgggcttccctcaggccctatcagagattgcactttgagctgcttttttggacacaggttcccttatcagcaccagcgggtctcttaatgaaaatctagcatcttaatagattgttgagtcctgaatatactgtcttacaagtaagccttaaatgtaaaaatcaaggaagctcaagttactgatagacctactaatattataggtgagaacactaaaactagagacacattttcctgaggaatgttctagacttcaaaatgttggcactgagggggccgcctctcagcgagttgactactggtgacctctaatggcaatccaagatactgcacaaaaaccccgtggaaaactgggaactgcttgtattatgtgtggttaattcaactgcagttgtgaattcccaaggtctttgaaaaggtgctaagttgtctcatgattagaagggggcttaacagagtatcatgatgtagatccagtgagtcatgcctcaaattggaccacttattttctggctggagcaaacgatcattttcatagatgcgtaatattgcacataatgtaaagatatacacacatttaaatgtccacattaactcacccactagttaaatatcagaaggcatattactcctatggcttgaaatgtcctgttatttagcacaatattaccagggcagtccagaaatacctgcaaccattcattgcctgtctaatgtttggttttgaaggggtgggtcaggcagagggtcttaggccactgctggtaaatgccaaactaactctgaggtcagaagtccttgatgctacatccccaggttcaaaagcctaagaagccctcatttggactgggcagcgtccctccacctgagagaaattaataacagcaagcttctgaataattgctgaaatccacacctgaacccagatggaccagagcagccacaaagtcctcaaagcacctgaccagccccctcagtgggctatttttgtagaaaaagaatgagtcctggaaaacaaccaaatacccattgtttggctgcgtttattttccatcaagagtgatgcagatagcttgcccagtagggacccactcagcgtctaaagactaggcaaatggaggtgggtggactttggcagtgcatggtactcagtggaaggagagagcagaggaatcaagcaaagagtgagaaaaaaagatcctgaccatcaggaaaagtacagccaagagaaactctcagatggggaaaaggagaactggggtacattgtcacataatgcaatgacacagtggtgatgtgagaactcatttaggttttctctccaaaacttcagggtgagactactggaattaatttctattttatcaataccagagggaaaaaaggatgaattttgttatttttagcaatacagtatgtgtcacattcagaaaccagaaagaccaagtctggtttttaaccactactttatggggctgagtaagctgctgagactgacaaagagatcttctccgccaactttacagagttcacttacccccagtcacctttcccactcctggaagatgaaggtgtggccataatgcaacaaaataattaatggtgatgtttgaaaattaagaagacaaatccttataggctattcgtgttcattttttctatgtattttaaatgacataatgacatgtgctggaatatatatatgtatatatgctgttacatatatgtatattcactttagaaaatttatgaaatacataaaaatagtaaggaataattaaaccactcaattctactacatgacaatgataatgtccaatatttttatgtgtattcctgtaattctttattatttatacctattgccacacctctatttctttatccactactacagagttggaaataaaattactattgtattttgtgaatctgttttattttgctttaaagtgataaagatgtgtattacacattcttctaaaatatgacttaagagatgtacaatattctgtcataaatctatcacaatctatcatttaaatcgctttcattgttttgtgactgaaaataatgctgtaatgaacattcaataacatttcctttgtttacttatgtgttttacaatttactaataattcagatcactgaataaaggtgaaagggccttcccaatttcttcagtgaatgggtgaagatgttcaggttcaaaggtgataaatggcttacctgaggctacacagaacaagtgatgatacaagataatcagtagggaaatgagaaagaaccctcccctgggcccattgcctgggccaggacaagtgtcctgtgtccctgccggttccaaggctcagtgggtcggcttccatgcatggttgctatggaggcctgagtggaagggaggtgcccacattatggcttgaaaccttttgctcttcacctcatttcctcctcacagcacaccaggaaattggtgcgaagtttccatctgacagataaggaatcggaggaccaggggcccagaaaaggctccaaggaacagatcggagatggggcctagtttctagaaagttaactgaagccctttggggtcaaggcctttggaagaagtgggtgaggaggaaaagaaaagtagggggagtggaggaggaggagggaggaagaagcatagggggagggctggagcaggaggagggagagggaggagtggaggggtcagggaagagtggaggaagagaggaagaagtggctctgcatttgtaggcttcaaggcatgctggattttgtttatgagtaaagagtcctggctctcaaggttaacttttatcctgacaccagctatgaaggtcaagggctgcagagggtccagaactgtgctgaggtatgactaggcagatccatatgaaactgccattcttctaggccaaaagggatgaatgctggcaagtttatgggatttaaatcaatcttttctcctctgtctcactattaggaaggggttacttgtttttacaaatgcagaaactgcagaacagagaagtcaaacaacttccaagggattttacttgtgaataaaccagtttttgtacctgagctgtgtgactctggaatctacctgttcagtgcacatttaaacaagtgccctttctgcaagtgtctctctgagctctctttctgtgatttaaaatgtcatgtatataagaaaatacttccactgcttgaccctacccacactcacaccaatcacttctgcccctcaatggccacagaacattagcaaaagcaattgcacagcatgatatgaagtaaagaaaaaggttgccacagtcgctaaaagggagcaaatgcacaaaccacgccaaccgcagcacaaaaataagcataaacgaacaaaacaagagaaattcaaaaagaaaattgaacacatctgggattttaaaacaaaagtggagctctgctctagagaaggcctgtgtcctgcaggagacagaggagctacaaacagcccagccgacgaaggcagctgggacacaggagccgcagagttctctcggcacattcacagaagcactgcacctttcactgggaaaaccaaatgcacaaaaaagttgtctttttttttttgtaagtggttgacaaagaagaaaaagaaagcaaacaaaagtttgtataaaaatcccaaaaatgataaaactcacatttcaaatcagggcaggaaaagattgagagtgaactttgtgtttttcattaccattgatactgaatctttgagctgtatttttcagacaagataaattaaaaatataaaagtaaataaacctgaatattaaaaaataaaagaaaggtgatgttttcttgatttatgtgcattaaccagcaagtaattgcatcagaggaaatttgttattgtaattctcatgttctttcagttattggagggggaaaatgaaaggcaggaagcagcacaagtattatggcttttctacaaatttgcagtataataacattgtatttcctgattctgtagcagaatcaggaaacagagactatgttccgggaaaggatgaactgtgataaacattgagatgtaaggactgaacctacggagtccacagaggtgctgggagaagcttgtggagctgacagtttaaatgcatccctataacatgtacctggagatgcttatcctttggtgccacccccgtgtcctggtcttccttctatttctggccactccctcttagtctccttagtgaatgactctttccctccccattgagtggcagttttactcaaggatctgtccttggcacccttcccccacttgttcttaccataaaccccccagtcatcatctccagctgagccctctcttctgtactttagaccaactgcccagatgacaccttcacttgcatgtcccctggaatctcagccttagcgcttacgaaaatgattttttgatacttgcttccacttctttgaactccactcatcatcactaccatcatcaacacaaactggtcactccctgggcattccctgactttgtgggtggtcttctatccacgtttacaacgcggataccttagattgggttccctaaaagaagatgcttagacaaggatgtgcaagaaagtagtttatttgggaggcaactctagaatacaccaataagggagaaaagaagtgagatagggaagaaaaagtagccaataaaaggtgcacatcaagccagttccttttgtaggtaactagggttcaccctatggagaaacctgggagaccacacagaacatgccttagcattgacccacccagaaagtgagggaagtggggtgtttatctgccaactctcctcttgagagttcctccttgggggtgttaattctcttaaacttaagcctggcagcccctcaggcaaagacatgcaaatgctggcagttcaaagttgggctggcaagcaccaaatgacaagggctgagggaatatgggaggggtccagaaatctgggggcctcctctgactcctccttctccctccttcatgccttccagtccctttatcaaccaccaagtcttgcagattctacatcctatatagcagatatctgtcaaattctctccgtatccaaagccaactctcttgttcaggacacaatccctaacctgtagcttaatacaacaggctctgaacttgtccctctgcttccagtctccaattattatccatattgagacccggagcaagtctgatcatctcacttacttacatatagttttctatggctccctgcttcctttagaataaattccagtacctgtagcaaagcttaaggcatttgaatgatctgctccaggtaccgttttcagtcccatttctcatcctcaggcttttgtgaactttggtctcaataaactttcttcagttcaacaaaagtgcagtcctgcatagatgtggttttttctccctgaaacactgttcatgagttcctatgaattctttgctaaactaactcattcttcaggtctagcttaggcatcactcctccaggaatgtctccttgcctcccctaatcaaggtaagtgccttctcctttggggtttaataacatcctgtatttccctaccaaagcctcaatcacactccattacagtcccctgtttgcttgactgcatctctttccaggctcaaagctctgagagaacagggactccaggctcctccctttctacattacctctccagcacctagcacagtgtcattgtgagcatgtatattgaatagatgaatgaataaattgttgaactaagtgactaccaagagagtaatacattatgaatcattaaactcctaatgaaatttaatttgtctattcattactttggatgaagatactttttttcatggctaaaggcctatgcagttaatgacagagcctgattcagatctctttgaaaagatagtgtcaaaattgtaccacaatctggcagctcccaaattattgttgataagccaatttcagacttgtctacatatcaaaagttatttttttctcagggaaaagaagagcgtgcatgtgcaaacgcctgccactcaacaaccgtaagactatgagagggcgggactcactggaaggcagagagcctttttatttctctttctctgacctatgatgcttagccatgtgcttgttattagtggacaatcaacaaatattttctgaattaaaacccagatttgaatttttgaaacataagatttattttattaaaataagaaaatatacctagccatatacctccccaaattgaaaaaaggtattcagacaaagacttatacacaatattcatagcattattcataatagacaaaaagttcatcagctgatgagcggataaacaaaatgtgttgtaaccatcaccatacaagggaatattattcagccataaaatggataaagtactaacacatgctgcgacttggatgaactttgaaaacatgcttagtgaaagaagccagatgcaaaaggccagacatcatatgattacatgtatatgaaatatccagaacaggcaaatctatagagatagaaagtggatgagtggtttccaggggttgtggggagggggagtggggagtgcctggtaatgagtattgaatttcttttgggggatgatgaaatgttctggaattagatagtggtgatggtgcacaactttgcagtataccaaaaaccatgaaattgtacactttaaagggcaatttatggtatataaataacattttaattttcaagagattgtggcttagaaaactagaaaatatagcacagtgagaaaaatacaaactttacatttagatggatttatgttaaatcctgactctactatttactagttagagatcttggaaaattatttaacttccatgagattcagattcatattctgcaatataaaaataacaacacctgcttttagagctgttgtaaaagtaattggtaagtgtgtcgacagaattttgccacacatatgtgtaattaacatcattattaatactatatgataatttgatagttaaaatattataactgaaaggtgacaactgcattttccctcatatgaagcccaatccccctctgggactctttggcagagttgagaacatccacacggataatccaagtagaagcggtcagtgcacagcactagtccaccccattagctatggagcaacaatggtcatctccagggtttctacacaagactccagctcctgatgaataagggaaaaaattgtatcatttctgcttggcctaggtctctgtacctcctgaaaatttccatggtgtttgagttctcattttgtggactgtatggaattaatcaagctctggccactggtttaaccacagacttgtctgtactcttctatggtttcccacagcagtggaggtgtgcaatgtccctgatccaagggctcctttcaggttgcctgaagtccttcaagatcaagaaaccgtttggaattaaggacaccaaacctcgtgagatattttgttttgtttttttaaaacagaaaatgaaggtgagcatacaaatgcataacattccatcagaaaatgaaaccaaacccttggtcaaaaaagtgattcagccacattttcttaatccagtctatcattgttggacatttgggttggttccaagtctttgccatcgtgaatagtgccacaataaaaatatgtgtgcatgtgtctttatagcagcaggatttataatcctttgcgtatatacccagtaatgagatggctgggtcaaatgatatctctagttctagatccttgaggaatcgccacactatcttccacaatggttgaactaatttacagtcccaccaacagtgtaaaagtgttccaatttctccacatcctctccagcacctgttgtttcctgactttttaatgattgccacatatacaccatggaatactatgcagccataaaaaaggatgagttcatgtcctttgtagggacatggatgaagctggaaaccatcattctcagcaaaccatcataaggacaaaaaaccaaacatcgcatgttctcactcataggtgggaattgaacaatgagaacacctggacacagggcagggaacatcacacactggggcctgtcatggggtggggggaggggggagggatagcattaggagatatacctaatgtaaatgaagagttaatgggtgcagcacaccaacatggcacacgtatacatatgtaacaaacctgcacattgtgcacatgtaccctagaacttaaagtataatacaaaaaaaaaagtgattcagcaacagttaaatgagtggaggtgtcttaaaggtaatctcattattctcgaagtatctctaagattgagaccccagatttatggactgccatctcctacatgaaacgataaagagagaataaatctatgttcatatgcacaactgggccagaggatccagttttcatttgatttgaacaagtagaaaacgttcatcaggctttagccaaaatactacatattgatttaagttagtcaattaaaaatgggcaaaatgacaaaactgctacataagtagccatgctacacacctgaatacacgcatcatgtccaacaagcaattacttaattttactctgtgctgtcgcttgtttgctttcagaacactgcacatatgataacgagcttaatgttctgctttgcctgtagcattttcactgatgcccatgaaattctgaaccatatgattttatattctatactttctatttttcattatccaaaagtataattttctactgtgttctagtaaacagtctactgtatatgtatgaatgaaataatgtctttttccacagtgatgcaaagaactttcactcttttttacaaaaaagaacatgcctatgttgcagaatcaagctttttgtacatattaaactgcttacagtttgtacatagtaaactgtaagtaggtacaatccttttaaacttgtgagttacttaacaaaaatatcttcttaattagaaaatcaaactattttctcctttcatttgacgtaatgaccccattgcatggttttgggacaacaaagatactttagtatgagcaagttaacttcaatattcatggaaaactacaaggtcaaaactctccctatctcagtggtgagtgtggggctctgctttgtaaaaaacaaatggacagaagcaaaggaagttatgtttgtccttccacaaccatagcatgcatagaccatctcgactacaggtaggtaaagttttacagtcaaactccaaattccagatcttcaaccacgcggttacagtggggcagccacgtttataaagtgagaccctcctaccctctctggccacactgattggaccaggcaaaagcatctgacccaagctgggccaatgagcctcttccatttgaaactaccagaaatggagagtgaaagagcttagttttaacttggctgtatttgactgcagggtatataattttggaaaaagaatgccaggatctttttcttttcatcaggtggtaaatcgaaggctcatctgcaatgatgaagactaaaactcccccctggagtgaagcaaggctgagagacagaagagagaatgtcctgggttccaatcagagaggaggactgtggttcattgcagtggggcggaccaaggggctccctggtcccctgcttccaagagctcccatatcctggtaaccaaatctctccttccttttatttccaaaattcccccaatgggttttctattatttgtagtcaagagaatcctgaccacaaatcacaatactaaatatttttgaaatccaaaaagatataaggagagtgtgagtttaataattattaacagctggtctgaggcttgagactgtgaaagtaataaagtcatgagaggatttcccttgaagtacgtcagtgcgagtggctcacattgtcattcatgctttgtcgtcaccctgtgaggatgtgtatcattagaaggatgaggctaccacgaaaacattttttgaataaaccatctgaaatcgccttcagcttcaacaatgacttttctccataatataagaaaggtgattgtgcaacacttatcgcagctctcacagcattcctaggatatggggatgttttctcctattttgcagataaataaatacataaataaataaataaataaataaataaataaaaagcttgacttggagaactaatttgcttcaaatcacacagctagtcagggacaaagaaaagccttggactcaattcttctgggttttaagcaaagcattttttctgtgataccttgcccttgttcctgtctgtttgctaggcaaggatattggtttcattgcatttaaaggttttgaaagtgcttaatgagttattttatcattttggaaaggaagtgttaagaaagacattatttaacttacttttattcatatttttatattgtgtaaaaattgccagaagacatagaagcagaacattttgccttaatagtgtcttaaagatccctagctggtagcccccaaaagaagtctgcattgagacatggttttactgaacatctggaaatgtgcacattcaaatacaggaataagaacttcattttgtaacaaaaacaataattatataacacttcttaatattagctatcacttcctaatattttcactgtcacactgagctaaattttaatatgaattatctcactcaatccttaaaccaatctgtataaggcaggcaacataacttttccaaagttgtacagggaacaagaaacaaaactaggacccaaatcaaggattctctgatgatctccatgcttgtaatgttctctttctttttcccccaccaatatgtggaccacggtcttcttaacaaaatagctgcaatatgtggtattaatcattatgtacacacacagacacatacacaaatacaaaggagatttgctattaacttagattgtacaattaaaaaccaaaagccagtcattactgtatgacttaaaccagaacctgtgttctattccaatatcaggtaaatatgttattaccgaactaacaatgtaagaaaaaaatatagcttcaatgatgaagcaataccacatgttagaaatatatcaacttaccaaagtgaatgcttgaaattgatgcaaaagcagaggtcaagtgctaacagttatacttcttgacctgtgcagtgttttcctttcaagatgtgtggcacccaaagcaatggaatgactcaaaaatattgtaagtttctgggagccacatctgtgcaaaaatgggaccaattcagtcatacaactggataatatgttgagcaaatccagtgaaaccccgttatgtcaccatgtatagcatcccaaaatacaggccattcctgactctcaagtttgaatgttgcgagtttgcagacaaagacaaagataacgtctctgggaacatgttctgaacactgcccagggcctgtagagcagacaatctcattaagtgaggctgctcatggtttgaagatgagcattggtcttgctgccctctaaatgaagacataggaccctcagttgcatccttataagtgggccaggtacagtgagagggagacatggcttacggaattacagacatattacagaagaaatagaaaactttataagcatgaggctgtcatagaaccttggattttggtaacagaggcagagagcttcatttttgaaaaaagtctctgaggcagtcatcatgaaaaagcagccctttgagtacaaagataaatgttcacttgggagatgtcaccttcaagctttatttctgatactagtacagggagtgatcctgtcacaaaatagagctgccccttgtagtgcccgaggtctgaatggccttgaaactggcctgccttgcaagagcaattggccaactctcaagggaggcaaacatctgtacatattttttgatgatcatgtatctcactaataaaaaaattactaatcaaagaggaaggtgtttgcagactacttatatgaaaaaagacctgaagtatatcaatgttattatcatgattaacctaatagagaactcgtctcttacctaaaaaatgtactctatttctcacaaaattcttaaattggtgatgtacatgagtgcttctacagggtattagatttagctgtttcagctgttgagttggttgacatttgtattgcttactgttgtcttggtctctctgtttatgtgcagacagtctaacagtaaaacaaacaaacagacaaaaccaaaaccaaaatttcaagagtggaaaggagtttttccccagattgacattcaaattcatctgaccacgagttttgggaggcatgacatatgatgcagtgtgagtattctattcttgaaactaggaagtaaggtgcacaccagcccagccaagcctgcatagatgataatgtgttgtctctgtttaatgccgttattaatatgaaatgcttcctcattgcatcaccttaatttgagctttcagcaggatggtgacagttacactgctttagtaaagcacatagctagaacatcatgggaaagcacttatataaaaactctctctttccttctttctttctggcttgctttccctcctttgctgctggtgaccacccatgcttgagcagtgttttggctgctttcccactgatgagttttccaaaccttgtcaggagctggcagttaaatgttctgccgccagcttacagaaaatacaagttggattgccttgttcctgctttctttcaaacttgcatgtttatccatcttcaccttgattcctagaagagtcaaacatctgatcctcaggtcaagcctgaaggaaatggttgtcccagctgaaaataagatcgatcccaatttgctttacagtactcttgttaaagatcagtgtgtaatattttctctgtgtgatgcaatgcttcttaataaaaacaaaaagggatgtttgaccttaactttaaaaggtccaagcaacagtgacattcagcagagagaatattattccatttgcatgggtctgatgaaagaaataattctgacattggatacccaagcatagctgagaagggaggaaaagaggagaaataaagacagaacaaggcgacgggccccagcaaaacaacacaccacaaggcattcaattccagattagatcttgcttttattcccttctctcaaaaaagatgctttaaattatttaatggagaaaggtagtactttgaactccaggaaaatcaaaatgttacagctctgaggggttttttggtcttatgtatcttgtgaataaaaccagctttaaaaaaaaaactaaaacacaaagttgtctcatcttttataaaagcaagttcaaacatttggtacagatgaaggctggtcaagcatttaaacacataatttcaatgtctgatggctctagaataaaaggcacttgattcaaaacggaatgtcatgttggtcagcaatatatgcttccactaaataaccaaatacacaaattgaaataaagtgaaattctttttccagagttaatgaaaggttcctgtttgtgaatttggggctttgaagtccaaggcttccaaacagcaccaggaatttactggtgatttattactatttggacaagtggcgaacagagcattactctacggaaagtccacattccctacctgtcaagggagccttcctgaaatggggacaccagctccccttgctgcaactcctcttagggctgtgcctcaggtggggtccacatagtctggtgtggtcatctctcctgggccagcgccctccccctctctctgctctagcccctgccctatcctgtgtcgctcatctcccagttgctcttcccactcaccccaggttccaacaaagctcactttctctgccctgatcctttctttgtgacacttgggttataccatgaactgattccagggacagttttgcctgcattactgctccataataactgaatgtggagagacgttttcagacccttctcagtttctcccaggtggccaattccacacatacaaatagtggccactctccctccccatgcctagatgcccacagtgtgcatcctgggaaaggaccatgccctagaactggctagactgaaaggacctctgggagacaggggcttccctgacatgggtgggttctgaaataagagcatctgtgtgctcaggtgttggggcactcacagtcattgctggatgggacccaaggcagcgactcagggtgggggtgagtatgtgttttgacaccactcacatgagagtgactggacaaccccccccataacttactacagtatggtcttacataaaactgatcataacacattcacaaagcttaggggtattactggattattttcttattgtgttatttgcttggaaacaacatgattataatgaccattaatataaactaccaccaataagccatagaatgattaccttatctaaatgttcagtttgctattttttgagtctctggttttacatatcctcacatgatccatctcaatcagtgcacgtatgatagactcctgcaggtattcttttgtgaagtggctatccagatgtaaaaaaaagtacaagacaaaagctgtcatcaagggattcatggtttagttgaagataaaagaataggccttaaaggaatccacgagtgaggttaccgcggagaacagagaactgcagggagtttccgcgtggagccccccgaagctggacagtgaggctgcagaccctggctgttcactaactgatgtgtatgaccttgacacatagactggtgacaggacctctgagcttcagctttcacatccaaaaagtgaagacgatgtggcacccacctcacaggttccaaggagcatgaaatgccatcactgtgctgtacttggagctctaaaatgtgtggggaagggtatccacaacaatggctgatagaacgtcctggagtcacaaagaacaagcactcttaggaaaggtgccattttagttagatatgacacaatgaatcgggtttggatcaggagggaaggactgtctatttcaggaagtggaaaaaagaagaatgagcaataagtcttcatctgcctttgtgtccccacattatgtcttgtcttccaggtcttatggaaacacttccctcatgtaaaagagaaaaaaataaacatagtcgtattacattttgggtgaaacatttaaaatcagagacatcacgcacagctttgctgcatactaaaagcctaaaggagaaagaggaacagaaaaatgttgtttaatttgaatggatgttggaggaaagaatgatcttcaaatagttcagagtcctgtcttttggctgaaatccatttctaagtaaaactctccatagtgccctccctgcccttcttccccacccttcctgtcctaaccagctcttccccagaacagctctcaccttcccaaagcagaataaagcccaggacaatgttgaaggaaaactgcacttttacatttctagatgatttcctaacagaaaatatatgaactctcggaactaaaacttagctgaggattccaagctccaacctaggacctgaagaaaccaagttcattgggtgacttacaaatgtgttgattataactctcttcatagaatgacatcaggacatttgaatatgaaattaaagaatttactcacccgcctttatacttccatcaggccaagcagctggaaagacagtttttgcttttttcagaacattgggatattcactttcattaacattaaacaagctgaaaagttgttgaagtttccttgagatgtttgtaaagaatagtggagcaaacatttggaaatttgggcgaggcaggatgcatctccaacactgtactagactcttgctttttagtaaatgttatgtctggcttcactttgagtgtgaaggatgaatgtttttcaaaactctcattgctgtacaaatatgatgtgttaatgcctcaaaatcactgtttacccagctgcttccatgtaaggtacctggaactctcgccagaactttttctctttatgcatctactctcattttcattgccatttctgtagattattttaagaggcaaaagaagcatcatgattttgaggaggtggctccagatactcttaatatttccacaggcaccaaatcccagcttgatggcaggatggaagttaacttgggtaacatacacatgattagagaatccatcatcggggcattcccacccacaattttcctcccaagattctgttattcttttttaggacaaagactacccaggggacgtcattggaaagtctcatgtagctatgaaccaaaactttcctgcagaaaaccctacagctatccttctaatgagatatgttcaatctcagaagcctgaaaaagtggaaatactaggttggcacagttagaataaaattcaggaaagattcacatagttggtaattgaagctataaccatgcaagaggtcacaaagcaagagaatagaaagagagaaggcccagagccgagctgcagggttctccaacatttaaagatcaagagggtggtttattcaggtatgttatacaacaattcaaaatctttaaaatgtaaggtattatgtctgaagtggatcagtgaaatgagagattcagaaagactccagtgagtctggcatcagaatcagttactgcggcggtgtggcatggggtggggacagagtggagaggaaaatgggaactaggaacccccagcacccctccacaggtgctgaggttggtaaggttctgcagcccaaggtaatctctatgcagtgcatacctagtcacctccaaaaggcaaatggagagtttcaagtgatgcttcacttccaggatcagcagacatttctaatcatctttacaacctccctagtaaagatgttcagaggctttccatgtcaacagcaggcggcttatattccagaaagttaagtctgtgccattctctgcctgagccagtatgttacgaagagcattaccatggcgatttcacattctgaaactgtgcttgtctcttaaatgccacgtgccaatgagtcatagaggtgttttgttctagagccatgtaccccccaaaaagggagtttgtacatatttaccaagaaactattattattgtctacagttcatgcagttacaaaactatctttgcctccttttactcacaatttgaacccaatcttttctaaggtgctggcctcccaatattgctgtagataattcagccttggtttcttatgattaaagattatgactcacaccagcctacaagcctggagaattatactgaagttgatgcctcacgatgatccgatctggagattccatacatagcatattctgctactaccatgagagacttttatattgacgcaaatcatgtatttacctctttatgacaattaaattacaaaatagtccatgcagtgatccatagtatcatctcatcttgataaggaagggttaggtagaggaagaattgctggatgcttttaagtcatcctccaacatgaaccagcttcttataaaagatgagacagttgcatttatatatccaaagctagctgctatattttctaagtcatgtctcaagtagagcatctagaaaaaacctgtatcagtagtgcttaagtctggcactgcagggaagctggtttaaaattacagagcctctgtaattttcaaatgttcaaaacatccaacctagagcctgggaatctgtatttttaatgagcatcgctcatgcattgctatggaacacacattgcatatatagcattttctaacatataggatcaggccagaggaagaatgtctgtgtatgagaactccctaaatgatgcacagttccactgtctggttacagttgaaaccgtttttgtacttactaccatcccatgcaatgtcactggttacatacggtttaccagatgtgattattactgcactcatcttggttgatatatggataataaaagggccttattagaggtttttattatgccccacaatcttcaaatacctgctgattagaaaagttagagcagttatctaagagaccctgaaggatgtcttcagtgtatgtcatcaacaaaccccatgattactcctctcttggcttggcactttggtgggttaacaatggagaggtgttgccgggcttgctcccaccacctccacatactagcccgaggcttggaaggatgtgttccaggcattggcccggactgcatctatgtattcctttcttacacaggatctcgttgtctgtgggatctttgtctgtcatgggtgatccaggagagaccagctgatggctgatggggtcacctcagcagcccaggagatatgtgtccttcaggttgtttttgacaacagcaaaaccatcaggagcatcccctccatgatgggacttctcagagtgtggtccctggattcctgcatcagcttcccctgggtggttgctaaaaaacactcaaaggccaagcatggtggctcatgactgcaatcccagcagtttgggaggacaaagcaggaggatcacttgaggccaggagttccagaccagcctggacaatatagtgagaccttgtctctaagaaacttaaaaaagaaaattagccaggcatggtggctcatgcctgtagctactcgggagattgagacaagaggaaaggttgagcctgggagttcaatgctgcattgagctataattgtgtcactgcacttcagcctgggcaacagaccaacaccctgttttatatcataataataatataataaaaaaaataaaaagcactcaacttctgaatacctccccaggcctactgaatgggaatttctgctggcctctggaatctgtttttaacaatttatcctggtaagtcaaatatacagtaatgttttggaatgaaggtgctaattacagaggctgaaggggaaggaagcagtaacttgccgcctttcaccatgcccagctctggaataacacaaggaagccttggaagggtgagctccactctagtacctggctgttagcataggagtattattgccagatcctaaacccaccacaccttcgggattactcatctcaataaatgacatttccactttatttatgtatttatttattttgagacagagtctggctctgttgctcaggctgaagtgcagtggcgcgatctctcccgggtttaagcgattctcctgcctccgcctcccaagtagctgggattacaggcacctgccaccacacccagataacttttgtatttttagtagagactgggttttgcagtgttggccaggatggtctcaaactcctgacctcaggtgatccgcccacttcagccttccaaagtgctgggattacaggcgtaagccaccgtgcccagcattttccacttctgagggtctctttaactcttttcctcaccctcctcatccaaaatacagcaggaaattctgcctgctttcaccaagtgccatcacttttaccacctttgcctggaccatggcaggtggctctgcttctccctccaggcccctcacccaccactgttgatgtccatgcagcagccaaactgctcctctgaaaacaggggtcaggatatgtgatatcccagcccaaacttctcaatgacttccagcttcactatagaataaaactgaatgtccttacagtggccaccaggtccctaaatatcacatcaacctctgagaagccacactgacttctcagaccttccttgtctccctccacttccccaggacctgccccgctgccgctcctaaaggacatcagacttgcctcccccaggactttgcagggctgctccctctgcctggaatcctccacccacagaagcccctccattcatgctggtctctgcacaaatggcattgccctgtggcatctcaggacctgtcctgtagagcttcccaccacttcttctcacttgccttacttcactttcattcatagcacattttatttcctgacatgtatgttttatttggtccagttctgttgagggccctctcccaagaaacaaactgccagtttctcactgtatcttccacggcacaaaaggagttggctagctagctctctggccactgctgctgctgcttcttctaaataaattttatcatgcatatttggggcttacaacatgatgttatgggataggcgcagtaaaatggttacaacagtgaagcagtttaacctgtcatctcacttagttactttttttgtggcaagagcagcaaaaatctacttacttaacaaaaatctctaatgcaatgcagtgttattaactttagtccccaggatgtgcattgggtccctagacatgccatactacatatctgctattttatatcctttcatttatatcttcccatttcttctacccccaccccgcccctaccaccacctgtggtaactactgtttcattctttgcgtatttgagcttttaaaaaacgttccatctataagtgagatcatgccatatttttctttctgtgtctggcttattttacttggcacaatgtcctccgggtccatctatgttgtggcaaatggcagaatctcctttttaaaggctgaattatatccctgtgtatgtgtatataccacattttcctcatccattcctctattgatgggcattgaggtagtgcacctaatgctgcaataaacatgggaatgttgatacctttagaagatggtgatgtcatcagatatatagccagaagtgggcttgctgggtattacggcagctctatttttaatttctttaggaacctctatgctgttttccataatggctgtaccaatctacacttccaccagccatgtactagggctttatccataccctggccaacatttattatctcttgcctttctgataatagccatccttacagcttggctatttcagagagtcagagatattacataatatctcatagtgattttaatttgcatttcccttatgattagtaatcttggacaccttttcctatacttatcggctgtttttatatcttttttggagaaatgtctgttcgggtccttggtcctttttttttttttttgaaacggagtctcactctgttgaccaggctggagtgcagtggtgcaatctcagctcactgcaagctctgcctcctgggttcacgccattctcctctctcagcctcctgagtagctgggactataggcgcccaccaccacgcctggctaatttttttgtatttttagtagagacggggtttcactactaaaaccaggatggtctcgaccttgctccatttttaatcaggccattttattttctgcagttgagttataagagtttcttacaaattttgggtattaaccctttatcacatacttggataagataaggatccaatttcattccggtctcataaaggcattaatcccactcatgggggctctattctcatgacccgtattagtcagggttcttcagagggacagaactaataggatatatgtatatatgaaggggagtttattagggagaattgactcacatgatcacaaggtggagtctcatgatagaccgtctgcaaagctgaggagtgaggaagccagtagtggctcagtcaagccccaaagcctcaaaagtagggaagccaacagtgcaaagccatctgtggctgaagccatctgtggccaaagccccaagagcccccagcaaaccactggtataagtccaagagtccaaaggccaaagaacctggggtccgatgttcaagggcatgaagcatccaacatgggagaaagaccacaaccacaagactcagcaagccagcgtattccaccttcttccacctgcttttttctagctgtgctgccagttgattggacggcgcccacccagattgagggtaggtgtgtgtctcccagtctgctgactcaaatgttaatctcctctagcaacacctttacagacacacccagaaacaatatttgcatccttcaatccaatcaaattgacactttgtattaaccatcacatgacataatcacctcccaaaggcctcacctttgaatactagcacattgagagttaggatttcaacatatgaaatttggaaggacacaaacattcagtccaatacactgccctgctaattcaaatggtgcctggcacacaatgggccatgagtaactgtttgttgagtgaataaatgaatgagtgctcggacactgacactgtgcttggaaattgctggaggagcttgtgagttaggtattgacttttgtgttttgcttggatcatcttggtgaattctcacccagtcctgtgttgtggttgttcttgtctcaatagagacaagtaatcgtggccaatcgtggcacatggtgcctttccctcttctttcacttcactggggccactgtagtaatgtggacctatgattgacagctggtagcccaggatacatttcagctggaagctctgctgctcctagggcccacatttcaccaacaccacagctgacatttttcagaagcctactccacttctagcctcatttccacatctccctttcccacgtgattcacatcttctgattccttctctgcttcttacattctcaacatgctttgtgagctccaaggtcaagggcacctcatattccctcttcccatttgctggtgtcctctgttactgctgctgcttcccctcccttagagccatccatggaagtggtgcccagaaactttcagaacatgttatttgccagatggaagatggccagtgtcagagctgtgtataggagacctgtttgcagagcatggatttttccaaaggtttgcttctgggaatgcatttgaaatccactcatctaaagtagacttagagtggaggcttaggacacaatttcccatttctaactcaactcaaggccctttcctgcacaaatttccctttttcaacctgctttggaagctttaaatggaatgaatttaaagagatttaaaataaatttgattaagtaatttgaaaaacaaagaaaaggtagcagctgcctagatccccatctgctctgatttgtctgcaagaagataggatgtttctttctctcctctgttcctagtattcatctcatatctgacatccccaacagaaaatgcactccattctgcctgcagtagtccagaaccatgccaaatgagaaacacaaacacaggcgtgatttatgaggtcctcttctcttccctgtgatcttctctgtagtgccattctctccaaggtcctgaggtaacagatgtccccattaactcagccaggaggggctgaaaggcacatcagactaaagagagagagagaggtaaaaggtcctagctcctcaaactgagtgccagtggatagtgttgcacagagtgggaagagggctcatggcaggagccaaacccaagtgtcccacgggatgtgtgtcttgagacaacatggccagccccacccctcccctcatccctcagtgaaaatgacatccaagtgggacagcccagtgccatggcagcaagacagctggagctggaagcacagaggggtggagagatctctgtgggctggtggtggggccagggctggtggtggggctgctggtctatgtggtcacccccaggcacctgttgtgccatgggatgcatggatggatctacagtagcgtgaccgtgaatgtgactgtgatggttagtggtggtggggatggaaatgcttccatggtaattcagtcttaatcttgactcagactagcagtgcaacattaaacttctgtttgaggcggtactgtaaaggcgcccaacatcaagactctgccctttgcgggtgaggactgtgcggttctccttctgtcttccttttttttttcagaagaggaattttacttttacccacttatggtaatatttgcaatatcagaatataattaggttaaataaatcaaataaggagtccagaagaaactgttcttgagttaagccaaggacacactggcaatttcgagaacagagaattctacacattaacaaaaagaacacacaagctcaaatgcaagtttatatggtgagtgttttcaaaggatttaaaaagcatgctccatcagcataatagctttttctcatttatgtaacagatgcatttctgtctgcttgtgtacagcaaagggttagaacctgaataaacttatttacaatttcagaaaggtgctattttagaaatgtactccatagaatttacttcgctgctcctaccactgattcttcaaataaacaaagtacggaaggtcttatcccttgaaaatgtttttaaacactagcactttaaattgaaacattggtagaaatgtagcaatgtcagttacaatgcctatacttagtcttatttaaaataagaattgaatgcacaacagaaaatttatcattttctttatcattggaggggagggagagaaagcaagcagaggtgggggtatggttacactatttaaggaagagctgaatacaaagataatgagtctttcatagtctcaacaattccacaatgaataactgtggattatctcatttatgattcacattggataaaaaataactggttccgctctgtgtatatcaatttaattcaaaccttattatcttcagaatacaaagatgaatactagaagataaactaactgcaataagtattttctaagtagaagaccaaacaccaaggggaatccctctttccaatgtcttctgatatggcaagattttgccagaatggaagtctaacacttaaataagctttctcttggccaagtaagaaactacagttgttgtgggtattaccctacaattaccatatgtattacatattaaattaaactcagcattaaatatgcttgtataattacgctgttaatgatgatagcagtgatgatgctggtggaaaaagcctgtctttagcaaaagaaaagtaagggagaaaaatgtaacaagcagaaagcaaacacagagttgggcaatttttgactaggaaagagaattttaaacactttttaaatcttcaaaatatttaaaacaaatttaaagggtctgttaattcatatatttttctttactaatcattttggattttttttctctgaattattgggcagggaagatacttaggtatggaagattattgctctaatttgagtgaaataaaagatattagtgcgaggcaaacataactcatttgaggataaagtttctgttggatatgtggctcctgatgcattttgacttgtcttttaaaatgctttatctttttctttaaagatttatttcaataaaactaattgggaccacctatatttcagtaggacctgagtatggattggaagtacttggcagggcagcagcaatcttgctgttttatttaacatgcatccttgggcaggtcgccattaaatcttacactgtggtgaagggatgattttttttgtaatgcacagtagagttagagtacttagttctcttgttgtccagtatatctaataagtgtttcatattatttccacataagggaaataagggagtacttttctttttccttctgtctttctatctagacatcaccattcatccatcacttaggcagccattgattcagcatgtgtacttgcatgtgcaagtgtgtatgtgtgtacatgtgtgtgtgcctgtgtgtgtgtgtacattatctactgtgtaccaggccatatttccggtatcaatctcagctcctcttctccagtacaaagattcctcttgtctataaatttctgtaatagagattactttctgtcaccagatagaaattctgtctggtgctcaaattgttgttgctgtttaatttatagtacatttttagctctttatttctaatttttaaatgtacaccgtgtgtccctgcaggcacagctccaggagctctgcattcccatgcaggctcagccaccacacactggagcaagtgtcatgtggcctcctctgtgatcatgaccactcatggcctgagctggccacagggaagagcagctggccacacttcaggtttataagcggctttgaaagcaccaaacatgatgtctgactctccctgtcctgtgattcccagggcccagactgggatctacagagaggaagaagggacacaggcttccttattactctccttcattaattcattcactaaacaagtacttactgagtgcctaccagttgtcaagtatgatgttagtgttgcgaatccagaagggagcaaagcaggaaagttctgctctcaaggagccacgtgttcctgttcccaggagcgtcaaggaagcccctgcaaggttgcgtcatcactgccagcaacagttgaacaaatgggaaaagcaatcagggaatactgtttcacagtaccaactatttacatatttggtaacaatttagttgttttttagtcttactttgatgatttttcttttcatttcttatccagtattttattcaacaattttctgctgatttaaataataaaattgcttatttaaaatcaacaaattattacactagtgattaaaaataaatcaaagtaaaggtacattctaatgcacattctccttctctgctgatgagaatgtaaattgatacaatctttctatccttaaaactttagtgctcattaatgaaataagtcacccttaagcaatgtattctaaagaaacaatcagagattgtcaaggatttatataaaggatgttcatgaatgtgattttaaaaccaagggaaatttaaagcaacctcaatgctcaacaataggcattaaattagtgatggcatatttttttcattatactttacgttcaaggaatacatgcgcagaatgtgcaggtttgttacataggtatacacgtgccatggtggtttgctgcacccgtgatggtgtatttttgtgagataatattatgcagttatttaaaaggatgcctttatagtgtgatttttttaaaaaaatagtgtatcggtaaagaaagtacttttgtataagactcaatatgtgttcattaacagcaagtcttgccaagctaatttcttttttgaagcagtaactagactaatgtatatgtggaattcaacacatctaaaagggcatatagagcttttcatatacatgaatagagctcctggagcacctggtgggttgtggttgccaagtgctggaaatatacaggtaaataaaatatagcccccatattcaagaagctcataatgcaaagatggggaaacaaacaaatggaaaattacaagaatacaacgttattcaacaaatgttgaccacacatttactgtacgctgactctacagcagtgaacaagccatacatatgccctcccttttggagctgttcaaactcatttttaaaagttgatataacagaaaagctaaattcaaggaagcacaaaagcaaagttgcctatcgaatatcttcagtctaaatttggtgacctgagcggggatgggaaagtggaggatcatgagtgagtgagacgtagcaccagccctcgggaagggtgacagcaaaatgtgtagggacagaaagactagagaggggaaaacaggggaaggaagtcacagggtagaaggaatcctgctttataacaggagccatcatcttttgagggtcgaggagaaggatccaaaagaaaaatgaagattgaagaatgaacactaatacaaatagatcatggtcctaaaaaggaaagacagctgagttcaagggcaaagagttcactttgacaaggaaagaggaagttaatcctcaaatatggcaggcaaagaaggggtcagtaataatagaatctgaactggaaataaaggaagttgataaagttcataataaaaaatggtaaatttcaatcttcccagaaataatgagctcatcccctgtgagaaagggcttagaaatgataacttaagggaacaaaaagatctatggcaaacttgctaattgactgatctcttgcaaaacattgagcatttaccatattctaagttcaaatacccatgactctgggaggacatggagctggccttggaaccagttcacatgatcaggggacctgcaaacacacctggaacatctacaggagcaatacgcatcacagaaacatgcatgtcatggccaacacccacacatggcctcagaaaagataggtaagcttggctgtccccttacttgccaagaattgtcagaaactcagtgttgtagaatagaaagaccgtgggcttagggtcgcatggaccaggttgtaatccagctcagtggttcaccaactggatggccttgcagagagctcagtacctgcccagctcctccgtgggcaccgaggtgcttgccagccatgcgaagctgtggagcagaccgatgaggaggtggaggtgaagcattgaacacacaacaagaactcactacacaacttatttgtctggttatgctttttcagattttgctataggacaaagattgactaacaggaagtggctttaggttcagattttccatcgttccaggtagacttatgaagatgatacctctattaatatttaatgctgtcatattttaggtacagccactgcaaaccaccctgcctagaacccatatttatttagtaggatctatctatcatctatcagtaaatcaaaaatggccttactgcccaaggtaatttatagattcaatgccatccccatcaggctaccaatgactttcttcacagaattggaaaaaactactttaaagttcatatggaaccaaaaaagggcccacattgccaagacaatcctaagccaaaagaacaaagctggaggcatcatgctacctgacttcaaactatactaaaaggctatagtaaccaaaacagcatggtacttgtaccaaaacagagatatagaccaatggataagaacagagccctcagaaataataccacacatctacaaccatctgatctttgacaagtctgacaaaaacaagaaatggggaaaggagtccctatttaataaatggtgctgggaaaactggctagccatatgtagaaagctgaaactagatcccttccttataccttatacaaaaattaattcacgatggattaaagacttaaatgttagacctaaaaccataaaaaccctagaagaaaacctaggcaataccattcaggatataagcatgggcaaggacttcatgactaaaacaccaaagcaatggcaacaaaagccaaaattgacaaatgggatctaattaaactaaagagtttctgcacagcaaaaaaactaccatcagagtgaataggcaacctacagaatgggagaaaatttttgcaaagggctaatatccagaatctacaaagaactcaaacaaatttacaagaaaaaataaaacaaccacatcaaaaaatgggcaaaggatatgaacagatgcttctcaaaagaagacgtttatgcagccaacagacacatgaaagaatgctcatcatcactggccatcagagaaatgcaaatcaaaaccacaatgagataccatctcgctccagttagaatggcaatcattataaaatcaggaaacaacaggtgctggagaggctgtggagaaatagaaacacttttacactgttggtgggactgtaaactagttcaaccattgtggtagatagtgtggcgattcctcaaggatctagaactagaaataccatttgacccagccatcccattactgggtatatacccaaaggattataaatcatgctgctataaagacacatgcacacatatgtttcttgcagcactattcacaatagtaaaaacttagaaccaacccaaatgtctatcaatgatagactggattaagaaaatgtggcacatacacaccatggaatattatgcagccataaaaaaggatgagttcatgtcctttgtagggacatggatgaagctggaaaccatcattcttagcaaactatcacaaggacaaaaagacaaacaccgcatgttctcactcataggtgggaattgaacaatgagaacacttgggcacgggaaggggaacatcacacaccggggcctgtcatggggttgggggacgggggagggatagcattaggagatacacctaatgtaaatgaccagttaatgggtgcaccacaccaacatggagcatgtatacatatgtaacaaacctgcacattgtgcacatgtaccctagaacttaaagtataataaaaaaaaaaagtaaatcaatctatctaccaatctatctatctatctctgtgtgaagggtttcttaatggttatttcctttcgtttggttactactatgccctatcttctcactttcacttaaaacaatacagttttccccaaattatcagtacttgcataaataagtaactaaaacataaatagtaatccataatagtaattaatactaattttattattaataagtaatagcaagtaataatagtgcttccttgactattttatcacttgcaatttactttaaatactgcagcacagacactgtgggattacatgcctgttacttgggttgagctaaaactcaggccctcacagaattcaaccaggcaggcacacttgcctcaggtgagagaggaaacccctctgctggaacaagtattgcagagcttctgttatctgtatcttactttggcttgtctgattagcatgcagatttgggttaaacttgtggcttgttaataagctgatgcatgcttaaaagtgtcctcttttggtgaaattgaaggtaatcaaagtatgtggattggctaaaatattatggaaatactcccctgtattataacagggtgtaaacaaccaaaggatcaatgatatttggtgattttgcctgaatcttgatctttttatggttctgtgtccagctaggaatccccagggctctgcctgcctgaagctgtccacacggttagcagaagcccctctgtggaattgcgggtgtctatctcaagtgaccttccaagcaaggtctgaacacctaacaggacagaagcctgagacttcagtgagctcacagaacaagttgtatgagctgcttctgtgcttgcttgataataactcctcaaccgaaaagagctggatgtgtcagaattttctttgaaattagctttccttagagtctactagccagattgtagggggagaagtgaatgctcagccacctctaacctctttaaaagctgccattttctaccaaaacaaaaacaaaaacaaaacaaaacaaaaaagagttttgcatgaccaaattgcctgaggtcagctggtatgctaatacattaagcaataatcataaaagtatttctactaatatttaagtaaaagttctccttgaattccagatagaaggagtttctacagtagaattaacaatttatttagtatgctcaaatcctcacattttggtgttcatgtccattagatggctttgaattgttacatttgtggcttatgtatatgctagctgaattgtgctttggcctttcttttctgatcagccattaatctgggtaaaaactgctgactaaatgagccccctggcatgttttcatatttgacactctctatccaaatccctagagcagagatactggtgtaagtcctataagggaaagacaacgactgtcttgttcgcttcatatcctcaatgcccaacatggtctggaccatagtaagtgctcagtaaatattggtgaaatgaataaaagaaacaaggaatgaacgagcatttctccctttctattcatatttgtgagtggcttgctgtcttcctatctgtctgccccataggcatctgtatgggaaggactggcagttggtgctactaaataaaccccatcttgggtaaatcactgtcaatgtgtcttctcatcccagtttggtctccactggttcttgggcagaatttccctgagatgtatccaagtcacagatttaaaaactgaaaagaaagtttgaattctctggaaattataatgtactcttctcaatggggcaaaaggaaattatacatatgaagagctgcttaaaataaaaacaaataaaagcaaatgtctcatttcacccagttttggaggtcaaagctcttgtccatgtaaagcaaagaactgagggtataacttatcttgtggaatccttgaagaagccatttccttgagcacaagacccaaaatgttcctcagaatggcttgtaaaatccctcggagggtcctatgtcctaattcagaggtggtaaatccgggctcttggtcaaactcagcctgatgcttggttttgtaaataaagctatattagtaaacagccacacccattcatttacatattatctatggccactttcccacaacaacagcagcatcaagttgcgcagagaccttcctgctggtaaagcctaaaatatttaccatgtttagataaaagatttgctgactgtatcctaagtgtctggaaagatttatccattagccaggagggacaatgatcctttctacatcattaaaacaacaaaaatgatggtagaagttatataacacacttcaaaagcactaggattaatgtcagacttgtttcaattatgccgatataaaaagagttggatgtcttgtttgttcatttatattgtgcctcattctacaaaggatgtgagctggtatataaaaacacatacaatataataaaaggttaaaaaattaataaaattctagccagagaagatacaaattaaaataggaggtggaaacaaaatgaaagtgtttttccatttaggatttaaccttttaattctatattattttatattaatattgcaaccactgcctttttctatttactgttctatcaaatctgtttagttcttttacagtttttttacaattatcaaatatttcaaaaattttaaatagttttttgattaatattacaaacactcataacaacacttagatttttcaaactaatattcaaaataaaggtgccatatttgtttgaacattaaaaaaagtacaatattagctggcacagtaactttccctcatcccactggcttctctcacccaaaaagacctctgacctctgtcttgaaggtggttcgcatcttttcaaatcatattttaaaatttataacatgtgtaagtaactattgtatatggtgttgctttctgttttttaaagtttacatgaataaggaattattttatgcataatattttcaacttgcttttatttcccaacactagatgttagaaattcatctatgctaaaataagtagatttagtgtatttattttaacaactgtgtagtagttaaaacatatccccaatttgtttatccattaccaatgaataaacatttggattgtattttaaagtattttttaaaagcttcagtggtcattctcataccttcctccttgtgcaaggcagaggtttctctacggcttatttttggaagagagatgggtaggtctcagagtatctcatgaagatgaactttactagatgatagccaaattgccctctgaagtgcttatactacttcctatttccaccattagcagagaattttcctattttgctgtattctaaagagtaaaccctcaaaaggaggtaggggcagaacaggaaacagataaaatttaacaagatacagctggggattctaagaagcagtaccatgaaaggcctctcaggtcctcctgaaatgtcctgactttactctgtaaacagtggaaagccttcaaaatctttaatatgaattttcattaatagggaaatattcactttgcttctttcttgaactttaaacaagttgcttaagcaaaagttctaaaaaacggccataacctcaaatatttattgattcagatctcaggaatctaggagattaagggctaagaatcaggtgtgggtggctcacttctgtccttagtttcttggctataatttgctgaatgttctcttcccctccatatctgccagttggaaatcttatgagaaatgttccctgttcaaggacatgaatgacaagatccgcatccagcaccctctgggcctatggggaagccaccaaagtagactcacattttgtttaaaatgatgggtgattgttccatcaagctctgacgttaatggtttcggttaatctgatacaattgagacaatattttctcttgtcattatttcttcatttttatcaaacgtcactcactgttctgggtaaaggcagatctagccttcttctgaagctgcacctccaactttatgtgctgacttggaaggatggctgtttacaggactcctgggctggttcaccttccttggatactcgagtactggagtgctcaaatgcatacgttctagagacggtttgtttcattataagatgtgactaaatatgaacctgaaagagccaattcataaagatggatcccaaatgtaaatagagttatattagtaaactgggcccaaatttaaaataaagccaagtagctatttgctgactagatgtctcacacacacactttgagttccctgaaaaccgacacttgtgttcagctttgggactcggttgaagctgagccctttctcaaccaatcattgttcagctgcctcaaccaatcaggactcagctgccttgaccaatcagggtttatttgcataggtgaacctgattgggaacttgggcaggaactttcagtagaaaaccagagctctcccttcgctttctggtacacaacttagtttttacactgaaggctgcatgtccccagtttgcagactgtacaccagaataaaatctcttttctccaaactccttttcaaaaaaattttcattcacagaaacatgttcaacattcttttttccctgagcaaacccacttaacttttctcctccagccttcctaggtcagagtcacaagttgtgccagaggcagaacaaactagacacttaggaacacaataaatagcaagcatctgctccagcacctctgaggaaggtgtgtacatacatacagagtaggacttctttcatttatgaatactctacatgtgatctggagcctttttcatttgcaattaaaagaaaaagactttaaaaataggagagatgaaaacagaagccaaaaccctaagcagtgtgggtggggacgtggagctgggtggggacgtggagccagccctaaggatggctggggaccggtcctctgcttcctgcatccgcttctctctggtgcttgcctcgttttccctggccgactgtcagagtgaagccggggtaatggctccttctggaaccgtggggcttgcctcttcacattacagggaccagtgaggaaacaggaccctccacattgattccagctacagtcctcatagagaactctgactgggtcagcctgggtcaggtgcccaccagggtccagggtatcagagaatgatgattgatagttccaacctcaacaaacaagtaaacaggaggagtaaacattttacctgaaaaacaagaagggctgttctggacagacaaaaccatagatgtgatatactctgattttgccacaagggctttatgccacaacataccagaattttccagcctcagatagctttgccttgacaaatgttgcacggtaaagaattttcttcggttacagaatccttttttggttttccaattctaatgattattttacttgttatttcaaatacctgagcatcctctgaactttcctctggcctatgtatctcttgaaggcaaatacttgctccaaacattacccaaaacatgaaggttcaggggctttgttgagatcatagtgccatgtcctctcctgtggtcagtgatgccagttttcaagtggatccttgccttgtagtaattttggctggatggggatcatgctgaatgactcacatccaaataaaatgaggacagcacagaaggagcactcttaggccgactgcaaaagtgggagagctgctcacggccagtccaactgtgctccctcccagtctgccttcaatggtggctgccttcacaggacagatttggatttaatgtgtgtttcatagagagtaaagggaagacttcatctctggaaagtcattttacagctgagaaaaccgagccccagagatgtcacatgacatgaacagagccatgcagcccatgagatcccctaaggaacttcacaacagaaaacatcaattaggtgcctgctgtgtgcatccatcgctgggccctttgagtaggatagagagtagaggaggcttaaagcatggttcctgccccctgtgagcctccagtcccagctctgcagccacacacgtcaaactctaaaaacacaggggcacatttgacatttttccaaatagaagaccttacaaaatagtcaaatgaatttcaaaattcaggttgtcaccaaccatctatcccgtatgtagggcttacttcaccaagtgaacaaatttattacagcacggagatacttcatgctaattctaacacgttgcctgttgtaccctggccatagctctgcaggtagcaacactgaataaatactatgaccaccagcgcctcttgactaaggatgatctcaggattggcccctgtggtcttctaagggttaactggggaaaagagtgtgggattccagggtctgcagttgatttccaagagtcactccttgaggggccactgccagcacaacatctggcatgcacctgaataaatcccagaagtttccttttcaatattgtataaattctgcaccttggctcatggctattaaacccaccgtggcaagatctccgcaagcatggcagtatttccttcatgagggaggaccactccaaggacagcagtatgaagccatctttgcccaccgcataccccagagcctccagatacagctgtcgtctatgctcctgctaataattccatttaactcactcattttttggaaacaagcttttcatttggaaatgggcattctcatacactttcctaccaccagattccttctcctcctcttccagactcaatttcatcctggaaagcatagccatgggtaccctgccaacccctccctgtgcattctggtcagccaagccctgtcactcaatgtggcttcaattaaaagcagaccccttggagagggccgccacctgcctgccctccttctttctcctttgctccaagctcatgttgctgaacagaattctttaagggactcttggcaaggttgatcatcctcagtcctggcctccagttgcttcccctgaatgagagttagaactggaattacagtgtattggagacaaacaggttctataaggttatttggccccatagccccattgtgcagatgaaagaaatggtctccaaaaggatcctgctgctgtcaggccaagcaagggtccttaggcctcatagcctcatgtgtgctctgccctctgctttgtgtatgcttctcatcactgcacccttctggccaactccagctcaccattctttgctgagcaatacgggcacttctgggaaattatctttgctccctccccccatctcttgcccctcccatggaatttgttattttctctttggacttctagtttttcacagcacttctgttacagcttctcacagtgtatcagacagacagattctgtcctagtttgccccccttcccaaaagcaaatcctaagacaaggattcctaatgacagcagtggatgtgggagtcaaccctgggaaccacgagtgggatatgtggagggatgaaaatctataaaggatgaggtattgagcaggttctgcctatgcacaatggaggctcaatcccactgggaccccatgcatagcctgagaaagacacgcctcagggcagtaaagagcaggaaagctggtgcatttatttaccaactgtggggcctcattttggggggcctgctcctggaacataaactgtctggcacttccagccccttcaaactctgagcaaagcactgtcctcagccagaggatgcttccaggcagagatatcctgaaacagtctgcagggacccccagtgttgtccaaggactgacagtggcttctacagaggctaacttgcctgtgtcccccagagaagcacagcctggattgtattcatctcagcagacccaagatgtggtgtctaacgggcacattcattattttcatttaacttaaaaaggaattaagccaattaataacctcacataactaagggacaggcacagaacttgtagcatccaacttctgattggatgtttctccaaggtattgcatttctcagaattttcaaccagatcatccctcttctaatatcagaagtacattccctcaagtcctggggacctagtccaaagtagccttccagtagcaagattttaaagtgtatttctgaaatctttatgaattacatacttttctacaattcatgcacatttcatttagtatttttaaacattaaaattaccagttaaaattatcaacaattttttgtacatattttgtgagaaattgatgttccagcataaattttctgtggctatctccgggcttcatgtgtctcctagctcaggctattccccaggttgagagtcacaatcctcctttccatgtggaaactacatgtgatagagatttagttctgggaactctgccatccagcatgttaggggtctcctgctttagccttgggatccatgtcgataaggggagttgctgaaccattgggctagggccccatgaatacagaattgctgctgaagcaagtgagaatccaggaagcagcatagtgggaagagggaggaacaggcgcatgaagagttagacttgaaatgtgtcttctgaaggggctggttcatgcttggtgtttttcccatgcctccttcgtatgtgtggattgttcctgactatctgccctgccccacctcaccatatatgcttccaagaagaatgctcttacaccacaactgtggccagtgatagagagtctcctgaagattttgttaggggtgaaggcactatagttagtggaggtctccataaagcaacttttcctaggtcttccttcttggccatgcagaagataaatcactttttaaatctttctctttccttaatgcattgccaagcctttcggcttttggcttctctgctcctggactcccctctgacccttctcctggctttataggggtggttttccccacagccttggccacatatcagtactcactgccatgcataccccatcccttctcaccattaaaccataaaggaccctccaattacaagtattctacatctttagcaagaatctccagaattataaatatatatgattctttttcctcttgtattccttataaccatgagcagaaatagaagtaaactccaaatccatttcacttggatgaaatagatcaaacatccagtatttcatctttactttgaatgtttaatagaagacattaatagatggagttagtttgaatatcatcagatacacacagatacacacaaatttatatgtatgtgtatgtatacagaaaaaataatatttgaaaagaggaagctcgtggatattgcctctctgcttcacgttcctgcctttctcacctccacagttccccagtaaacattcttccctcagctctgatgcccccatggctgggaagtttaccttggaatcccaactagagacaggattgattgtcacctgtttgttctttcaggctttgcttgtgcttgcattatggtgaattagagagaggggctgtctcagattgtgcaccctcaagacagatcatgagatgaggattctattgagagctgatctcaggcaagtttactcaacattttataaatgttaccccatcgtaagcataaccccttcatctcagtccctctgagaagcggagcctagcacagaagttctacccttcagtgattcactgcccacggtccccttggcccagtcccactgcctctgaccttgttgttaccctggggtgctccagggaaacactttgtttggaagtacactgtgttccttgggcggggcttcaggtcccttggttctgaagcatttttctcaatgcattcccatctactcatcatctttcagaactttcccccatgtctggcctgcctgaagccccactccctgctttccagaacaacgatgggttttgctgactggcacttactaatgggccaggtggggaatccattgcattgtgggggaaaggtgtcaaggttcgctggcagaaaaaaatgtggtaagttagttattgagggaagagtgttcaggtcaagcagacagtgggagtggcctccagtactaggggagaagccagtggactcatgggctgttttgtcttcctgcaatggttagcatcaagagagctgagaaccaagtattttactgagtataatcaaggccttgtcaaagataaaacctgactggctacacccctggttactgggatatgctgtacctccattataattagaaaaaacacacctgcgtggagtgaaggctcaatgtagggatatgctgttcctacattacaattagaaaaaacacatgtggatggagtgaaggataaatgggggcagatcaaactttcttcctgccttggagggaagtgtagaggtctgctcaggaaagagcatcagaaggaagatgagataatgaagcaccaccatttggattttgtatagaaggaatgtggcttgcaggctgctgagcttcagggtagttttcatctctgatttctccccatgggaggtggctgccaaaagcaatgaatcaggcagtagaatgtccacaccctctcatctgttctaatccatctttacccagaactgcctaaggataaatcagcatgaagctgcgcgatggaggggcgtgttgtgatctgctgctgcccggtcatgatcagctatttccacacgtcagcacgtttatctctttgcttaaagctatttgggttgggattcctatacagtgctgttgaaagtccgtatctaatatattctcaatttggatgaaagttttcgagggagaatgatggttctcagcaagtcaagagatttcagaagaatggtgtgagaaaagtatggaatttgaagaaaagtgcacagctgtttaatatcatgaagtcctggttttttgcaaagtgaaaagtttagatcatagggttagctgaaaattaaataagatgatacgcatacatatatatttgtatatgtatacacatatgtatcccgtatatgtgtgcatgtgtacatgtatgtatatgtgtgtacctaaatccacatggcaataatccacgttccacgtgatccactctccacatgaagtgaacacaaagaccctcaggccagtcactgcagaataactaaaaaggcattccatttgtagtttctgtctaccgttttactatttaaggaactaaatttattacccacatccacacttgtaaaatcttttgaaatttccttaaagcaccctggagcctctcctgccacacttcagccccaacctttgcctgtgcttcccccttccttccccttctagcctttctgctttttcgtccagagatacactgaagacatagttcatgtgtatttgttaagtgaatggagcctcaaaagatcagccttcctgggccatcttaacaagaacagaaactcacgatgccctctttctacacagatgtcagagcttatcattattacgccaatacagtaagaggcaaactgcataattagtaagaatttcatcaagaacagcattttcccagggggaaacagagactgcaatcagaaggcaatgtgtttggtggggcaggggatgctgaaagccccctgaaggagtggggaagaaatcagctatgacactcagtgctatgactgcaagacagctgcagacaccctgctaatttcaaacctagctgttattcaatatggatctgggctttatcgtctctagataattagtaatatttgtccttaggaggtgtgctttctttaatgggggtcaaagacatttgaagttctctttagtggtaatagggcgctgaacagtgctgaagttctcttcagtggtaatagagagagagaaaaaaaactcaaatggagcaagtgtgtccaatgtcacccatgtgaataaaactcctcatccacaatgatgtaagggtgtaggacaatggccaggttgctcacactgggctgggccacccttcaagactcagactttggggagattgaaggaggtcactttctgggaaagagctcatgtttccttgggcagagagcagactttcatagagagatttcaatgcaacctcccactcctgcccccatctgcatgctgaaggaccagagagagatagggaagtgtgcacagagcaccctggagcagatgctgtgggaggctggaccagacctccaggtgcctttttctgggtgctctgggggctgctatgaagactctcagtggtgacttctccagaggacttctgagctacacctctccaccctggagcacctggagaccctgatggactgaggcagtgtatgaaagcccagctcccttgccttaaacaacttagactctctcctgcagctgtgctccagaacagctccccttggaatttgattcagtcccatttcaccagaagccacacctttgctctgtttccctttttccatcctctcccctctcccttccaggtgtctcctgtggaaatctctcaatcaatcacctacaccagaatctctacctcaaattttcctttcagggacctcaacttaagacagctcccagcttcatccatgtcactgcaaaggacatgaactcattctcttttatggctgcatagtattccatggtgtatatgtgccacattttctttatccagtctatcattgatgggcatttgggttggttccaagtctttgcaactgtaaatagtgctgcaataaacatacgtgtgcatgtgtcctcagcaaactaacacaggaacagaaagccaaatactgcatgttctcattcataagtgggagttgaacaatgagaacacatggacacaaggaggggaacatcacacactggggtctgtcagggactggggggaaagaggagggagagcattaggacaagtacctaatacatgtgaagcttaaaacctagatgatgggttgataggtgcagcaaaccaccatggcacatgtatacctatgtaacaaacctgcacgttcagcacatgtagcccagaacttaaagtaaaataaaataaaaaaaagacagttcccttgtgacaaagggctggctttcttttggggttgcaaagatgggccatgccatctctctgtcataataattgcattctgaattattctaaatctgttgaagatcctcggatctagatgtgctaattttaatgactctgaagagaagagtaagcatactcttctggctacaggctaaagtagttctgctggctaaaatgagatgcgcatctctcagacagccaatggggctgcaaagttaagaaaatagtcttttattcttggtgacagcaccattccagtaatgttagtggtgctacctgctttcgcaggcatctgatatcagaacacatgctctgttggcgctagccacagaacacttgctgatgtgatcctttcttccactcccaatggaggtgatggttttgcttccactccaatgttttcaagatgaggagatgaccccaactggctttgttttctttacatgattctaaaaataacaactatcttcttttatgtgttattcaaaactggtccatgaattccccaagatgcatctccttttaatgtgtgttaatttaggaaccccaaaagcaacagcagagaagataaagtatctcaacatatgttatttttaaattcttaacatctgagaagcaaaaagcaaaatatgctaaaaaaaaaaaaaaaaaaaggaaaacatgtgaagccaaaatgtgccttctggcctctgattttctgtgtaggtaaatcctgcttctttgaagcctgtctacccgctcaccaaagcattccccaggctaggactcccaagaaacaccatctggtcattccaaccctgaacattccctccttgtctgatcacctattaattatatggcatatttctatttaataatatcacatagccattggggctgagatcactgggatggtttcatagaatttgattcaaaccctggccccaggacatactgtgatcctgaaggacttacctgaattacttgagccacagtttcttcttcaggtgcatgagcctgatattttgacaaggctgtgtataaagattaactgaagtattggatctcagaagcccaactgaacagactctcaatacatattcccctgttccttgctttcctcatgttattcattattttttatatggggaatctgtgtgtcatgttgtttgactacactgcaagctacttatgaggagagaatcaaagtgcaagtcatttatttgagaggtgctccccgggagtcccaggaggagaatgtggaaatgagactgagaaggtgatatgatttggatgtatccccacccaaatctcatcttgaattgtaactcccaaaattcacaggtgttataggaggaacctggtgggaggtaattgaatcatgggagcaggtctttcccatgctgttcttgtgatagtgaataggtctcacaagatctgatggttttaaaaacgggagtttcccttcacaagctatcttctcttccctgccgtcttccatgtaagatgtgacttgctcctccttgtctttcaccatgattgtgaggcctccccagccatgtggaaggaactgttacttctcatttaacctctttcttttgtaaattgcacagtcttgggtatgtctttatcagcagcgtgaaaatggaataatacagaagggaaggagctaccagagttagcaagcaagtccttaccatgggtaatcagagcttaatgttgtgaagaaagtcagaaaatggcagaaagcatgtgctccgaagttatccagcctgagggcctgggaccaccaacccccatcagtcatgggctaagagctgtcccagggcacttccagtctgctctgttctcagacagagtcatctttcaaggctccagagaaagacccaagtaaaaagatgcagccattggatgcttgaaattctgccctaaagtaggcataatcaggccaaaggaaataaaaaggatagacactgagagcgcttgctacaggagcctttagctgagaaaaaattctatgatgatgactgggttgaaaacaaagtttgagtataaatactaacctttacgcaatgcatggagttagttgtagactcttttgctggcaagaagcagaaaaatgtcagtcctgcatcaaggatcttatttacatctagctggaacacttctttaaaagcccaggcagcttgactacataaagtatggaaggatgaaagggcatacgtatatgtgtttatatgtgtacatatgtattcacataaaaaactgatcacaaaaactccctcccataggttagccaaaaaaccatttggattgctcagagttaacacaaggcaaaggaggagtacatactgggaagatcacaaagggtgagatagtgtccagactctggtcagggggcatggtccaagaaagtggcactggcctgagagctgacagatgtgtagcagttaaccaagtgaagggtcgagagtggggccggggagggccaggaaaggacgtggtgctagaggccctgtggcaggataaagtgtggaatgaagccagcagagaactcctaactccaggggttttgcaaagtgaccttagttgagtcgtttagcttctctgcctctcaccttttgcatctgaagagtgaaaacaataaaccctactttacagcagcctgtccaatagaagttcctgggatgatgatggaaatagcatatctgggctgcccagtacagtagtttctgtccacctctgactgttgagcacatggaatgtgtctactgaggctgagaaactaaggtgcgtcttctgaggtgatatggtttggctgtgtccccccacaaatctcatcttgaattgtaactcccatgattcccaggtatcatgggaggaacctggtgggaggtaattgaataatgagagtgggtctttcccatgctgttcttgcaatagtaaataagtctcatcagatctgatggttttaaaaaacgggagttaccctgcacaagctctcttctcttgcctgccatcatctatgtaagatgtgactcctccttgccttctgccatgattgtgaggcctccccatccatgtggaatggttaggtctcattaaacctctttcttttgtaaattgccaagtcttggatatgtccttatcagtagcatgaaaatggactaatacagaagggaaggagctaccagagctccttcaatgaaaggaaagctttcattgaaagattttcgttgaaacctccttcaacgaaagctccttcattcactaaaaatgaatttcaattaacctaaatttaaatggccacaggtgactagtggctatcctattggagaatgcttcttgaaagtatgattttagggattaaagggaattcatctttgtatctaaagtgtccggcacagaacagtcctccatccatcttggttccccagccctgaagtgagatcctggtgacataagccaggtctctatatccaatgctcatttaagattgcctcttcaacaggagcgtgtttggctctagtgtagcttgccaccagcagtccccattggtagtgatggcattcttggcatccttccagtgccatgattgacttagccagtaaaagacaaaattcagatggtagccactaaacagtatgaaatatctcagttttaacctaaagtggaagcaataacagtctccaaggctgcagaagcagggcttagcagacgaaccaaaagacaagaagaaaagtcctgttaaaagaataacaatcaatagctgaaagctattaagttcactcttctagttcaaagggatttgaaatggcaatttgtcaggcaactgttgtcactttagatgcccccattgctttctttgaagcccttgattgactacaggaggttacaccagattgttctaaggacaggatttccacagttgagcatacttatatccaagtaattatgactcttctgaatttaatcaacacaaggcaaaagagagctagtttgagaaaatatgcatgtgctctgcaaagtccaggcgatggcttcggtggctatgcccaaagccagacaaccagctggatggtttcagtcacttaattgtgccgatcagattctccagcaagtttccctgctggccagggaaagagggagaatcatagagtgaggactttctccattctgcttgttctgttcaacaatgaaacagacttccgcttgagatgggttgtttctaggaaagaacagccaatgagaaataagcaacctaacacattcacacagtgttgcctcttcagctagcagaggtggagctgggaggacattttcgccaattgttttggaaaacagatgcagaggcaagtgtacccctgtgaagcaatggctgaatgtctttaggggagatgggtgcaaaggggaattagcaagtgagaaagaggactgagaactgtggcagctactgggccttaagtcagactttcttctagaaatgtgcagaatggacacagaatgtgagaagccctctgaagcatgtttgccttaggaacaactaattgcaagttaatttgctacttttttgtggagttttcaggaacctgttcagcaagaatgggaagtgtgttcctgggtgtttgcagagtggggcatgcatggtgacatcagccagagctgtggccccgtcctaggcatccaagaggaaggtcaaaacagaaggtgtaaagggatagaagctgttgtcagagtccaacctcttcctaaacttctaagccctctatgactcaggaaagaatgtgtcctagagagaagggggcagagtgacacagatggtaaagatgggagctaacgggctctcaggagagaaaaagcaaggtggactcctgcccagcagatatgtgccagatgtccctgctatgcagccttggggacacatccatgccaaataactaaagagaagctatgacaggaaaaacaaaaacacacaacatgctatctacatacaacatgtggggctggggccaggagtgaggtcaggaagagcaccccaccaaggcaggatgaacagatggaaggaaggtcaagccaggagagatctgaaaagaaaggatgggaggaatccacttctattttttttttcttttgagacagagtatcgctctgtcgctcaggctcgagtgcagtggagtgatctctgctcactgcaagctctacctcccgggttcatgccattctcgtgcttcagcctcccgagtagctgggactacaggggcccgccaccacgcttggctaatttttttttttttttttgtatttttagtagagacggggtttcaccgtgttagccaggatggtctggatctcctgaccttgtgatccgcccgcctcggcctcctaaagtgctgggattacagacgtgagccgccccgcccggcggaatccacttctagctgtttggcagggactgtcccgggcacaggacgccaggagacaacgtgtgtgggcaaaagtacatacactcacagtaggggtccaaggccaaaacccaccagggcatttgctgttcagtctgtgatgtgtgattgttgaccacacagcagggagcatgttctgacagcgccaccccacccaggccatgtgagcaatgttagccctgcatttatgctgatggatctttcttatgggactcaaacggcattcattctctctgaacaaattaagaagaaactaatcccaacctaagattctttataaattactcagacaaaagaaaatgaatcactatatgcataagcagcagatgttatgtgacctcaaaattaatgcctattagcaggccaaaaaggtatgcagaagaagagaggtaagatttccatgctgacaggtttgttggtctaaattcattctggaaaaattgtgtctttcaagtaagaaagcacggtaggcaacatctttcctagagtcttcatcatcactcttgtggcaagaaagttgccaaggaaagaaagttgccaagaacttgagttggtaaggccatgaccaaagttctgcagaattttgaaggaggcaaatgttagatactgattgcataacagatgggtctgtctcacaagacatttactcatgatgctccgtcaaaggaaaaagtggtgatttcaaccaaattaaaaatataaagctttcactggctcatgaggaagatatccttttaagtaattacaggttgaatatcccttatttgaagtgctagggacctgcagtattttagatttcaatttttttggattttggaatatttgcattaatacctatctacggagcatcccaaatctaaaaatctgaaacttgaaatgctccggtgaacatttcctttgagagtcacgtaagtgctcaaaaagttttggattgtgggccagtttggatttcagatttgggatgttcaatttgtattactagtttttttttttgtttttttttttttttgtgtgtgtttatttattttattttttattattattataccttaagttttagggtacatgtgcacaatgtgcaggttggttacatatgtatacatgtgccatgctggtgtgttgcacccatcaactcgtcatttagcattaggtatatctcctaaagctatccctccccacaacagtcccgagtgtgatgttccccttcctgcgtccatgtgttctcattgttcaattcccacctatgagtgagaacatgcagtgtttggttttttgttcttgcgatagtttactgagaatgatgattcccaatttcatccatgtccctacaaaggacgtgaactcatcattttttatggctgcatagtattccatggtgtatatgtgccacattttcttaatccagtctattattgttggacatttgggttggttccaagtctttgctattgtgaatagagccgcaataaacatacatgtgcatgtgtctttatagcagcatgagttatagtcctttgggtatatacccagtaatgggatggccgggtcaaatggtatttctagttctagatccctgaggaatcgccacactgacttccacagtggttgaactagtttacagtccccccaacagtgtaaaagtgttcctatttctccacatcctctccagcacttgttgtttcctgacttttgaatgattgccattctaactggtgtgagatggtatctcattgtggttttgatttgcatttctctgatggccagtgatgatgagcattttttcatgtgttttttggctgcataaatgtcttcttttgagaagtgtctgttcatgtccttcgcccactttttgatggggttgtttgtttttttcttgtaaattaaggctacagtaaccaaaacagcatggtactggtaccaaaagagagatatagatcaatggaacagaacagagtcctcagaaataacgccgcatatctacaactatctgatctttgacaaatctgacaaaaacaagcaatggggaaaggattccctatttaataaatggtgctgggaaaactggccagccatatgtagaaagctgaaactggatcccttccttacaccttatacaaaaattaattcaagatggattaaagacttaaacgttagacctaaaaccataaaaaccctagaagaaaacctaggcattaccattcaggacataggcatgggcaaggacttcatgtctaaaacaccaaaagcaatggcaacaaaagccaaaactgacaaatgggatctaattaaactaaagagcttctgcacagcaaaagaaactatcatcagagtgaacaggcaacctacaaagtgggagaaaattttcgcaacttactcatctgacaaagggctaatatccagtattattagattttaattgtggtaaaatatacattattttaaggtggcaaaacttgacaccttaaccatttttaggtttactgttcagtgacattaagtaaattcacattcatgtgcaaacatcaccactattcatctccagaactctttatcctgcaaaactgaaagtttgtacccattaaacaactccccattcttcccttccctcaggccttggaacccaccattctactttctgtctcaatgaatttgactactttaagtaccttataggagtgtaatcatacggtatttgtccttttgtgtctaacttatttagcttaacataaagtgtgcaagattcatccatattgttacatgtgtcagaatttctttccttttcaaggctaaaaatattccactgtatgtacataccacatattgtgtattcgctcttctgtccatggacacttgggttgcttccactccttggctattatgattatgctactttaaacacagtgtacaaatatctcaagagtcactgctttcaattcttttgtgtataagcccagaagttggattgctgaattatatagtaattctgtttataaaattttgaggaaccatcgtactgctttccattataactgcacctacattcttaccaacagcacacaggagttctagtttctccacatccttgccaacacttgttattttctcttttctttctactctttttttgacagtagtgaaggagatatttttaattatatggaactttcagagctcactgattcgttgactcattgatttattcatatactcaactaaatatttaaccgatgtttacataaacatcggttaaatatgtagtaagtggttgaaagaaggtaaccaaagggtactgagtaactgtagtcacatctgataatcagtaccctttggttacagtctttcaatcagttactaattgaaataatgtctagatttcatacattcagatgtagtctaaatagagaggtagaaaataaaaagtaaataaataagatgaaacaagatgatgataagaagcattaaataatagatcaggataacatcactgaggaacgaatggtcaggaaaggcctccctagtgaggagcctgtctccagaggagcacaaggaaaagtgctccaggagggggaaaagcaaaagcaaaacccttaagaagacaaaagtagcaggtgcctgccctctgtttagcatgcatttccagactaaataatgacttataccaagactttcttgtttagggcaaggattgtgcatcacacttaaggaagggtctcatgcttacaaatacgtatatgtttatatatctgtatatgtatagcacatatcttacccatgatgggatttgacctgtttgacctttgtacatttgaggaccagccagagctcatccctgtgatgaagagcagggtggcatggtgtggtctcagggccaaattgcctgggttgaattccagctcaaccatgtgctagctgtataatgttgggcaagttattcacactctttgtgctttgctttcctcatctgtagagacaataatagtacatccctcataggatcatcgtgataattagtgagtgattatataaagtgcctagaacagtgcctggcacagtaagcgctgggcaaggtttagatatttttctgatgtcctctccatcgtgctagcaggacacttgttgatatgtagacattcatgggggattaaatagacgttaagtatagcttatttttaccctgcttgaatccccacaatctcatcccccaaacgctcttccaaattttcaacacttgaacaacagagtttcctacaacctgaggaaacctttatgtttctaggaaaaatcttgtatatgttgaatggaagcctatgtcttcacagttttccttgttcaggttctacctgtggtggctgcaccaaacaaatctggtcctacagtagtgtgtttcaagaacttcaagatgattagcaaggtccgctgaatcttctcttctccaggccacccacctcctaagacatggctttgagcatcttccattccttggcctggtgcctctgaatgagatctcattgatttctatatcacttaaaatacagtgcccagcactgagtgtaattcttcaagtgtgatgtgtcaggacagagtggagcagaccaacaactttcttcattcaagatccaattgttctcttatggcaaccaaatattgaagtcaaaattgtggttgccacgtattatgattcctcctaaagatcttatgtaaataagcaccaccacaagttctgtagaaatttagcttctgggacacttcttgctttaccacttttatgcagtgttattggtgtttgagtcccaaatgttaaaatatatatatatatatatatatcatttattcctgccaattgtttgaagcaatttatcactatttgacccctaaatttgttagacaatgtcatcaataacctattgcctcagtagataatctgagagatgcaccattggaatttttatttaagtaactactaacacatgtaaatcaaaaggagagagttcagaaccatgagccactgttggagtccttttttagattgacactgctccatcaatagaatattagaggttccatctttcaactagttactgacccaaaaaattgtgattgaattctttcctaatttcccttcattttgtaaaagacattgcgacacaccctgtcaaataactaacactagtctagcaagccactgctgtccagagcctcctggccattaggtaggggaaatgccttcttcaccagtggatgaaggagaattattgaactattgcccaagagcagagtatggcagtaccgggcatgccactgcccagggtaagttacacaggcatcacacagtgtccctggaaatttactaatagagttctctagctggacgagctgaactcagaatccctgggaaagcttatgagcacacagcctttggggctccatttccagagtttcagattcaggatgtctgggtggtgcctgagaatttgcatttttaacaaactccaaagtgaggctgctgctcttcatctgggggccacaatttgagaaccactcttttacacaaacttttttcatgtaccactactaatatagaaggaggtaacaatagagggtgaggttgatctctagttctgcttacacctttgagactattgaaacagaaaatctctctaccagagggctgagtaattcttaatgctgtctttaggttttattaaaaaggtctttgtcatcttttcttattagaattgtgattttttttcactcactaccttataaataagcctattgatttatttatgtcaagaagagcaaggtcttctctgatctttggccaaaaatttccctataacataatacctactacatggtttaatccagcatttcttgagaaaaagaaatagggtttagtgtgaaattgctatttctcagtgaattcatgctagcttcttgtgatcacagattccttttaaaagtgaagcagaatgagtaatgtattccagagtcttgcctgtaacaggcatttgaggtgtctgctcccctcgtcaatgtttgctcggaagcaaatggaatttgagggattcccttttctgcaagttgttcatcagctttccactgtggtttcccagcagtgagctgctccctgtggccatcctctgccttccttatgtgatcaaggacccctgtttgtctaacatgcatcgcagtcccctgcccactcagaacttgcaggccacctcacctccacaagaaccttctcttcctagtccgtgtccctaggcaggaagcatcccactgtcaaatgaatcttgtgggctcggttcctttctccacatcctcaggaactgcacacttttgagagtgagcagctacaaaggcgtcagtgacctccaactgatgtccatggccacttgtgtcctgggtttgtgttgggagaaggtgaaaaaagaggccaatgaacacagacccaaagaagggttggtgttgccagacactctcctgattccagtccttctggaaagggcaatcaagagtggagtacccaatttgtgccattggacaagatctcaccataaaaaaaaaaagctctatgagactggacgctgcttccctgcaagtccttcacctcctctaggtggctctctctcttctcggaacacatggtccttttccctcttcctgggatgttcttactcctgaaaactgcgtcatttgggcctttaccaagaccccttcccagtgagatttttcctgaatgttttatctaaatttgtaactgctcccacctccactcttccaatccctttttcttatgtttctcattagcatgtgctgatactgaaaatccaattgatttcattgtttattgtctgtccgctcatgtacacagaaatttttatctactcattccactattgtatcctgagcgttgggaatggtgtttggtgcatagatgatgctcctcaataaataccgaatgagtgaatgaatgaagtggaagagggaaaccgcaaaagggaaggtaggcatggaaacccagcatgctatcttgccagcagacatggtctcaattgcatcaactttttgctaggaggtcacgtgcaagtcaggtatttggctatcttaaagctctccaggcccatgtacaccgtcaaaaaacagggctccccatggcagtgactactactccagtttaaggtatctagtctaggtagttcacaaggcctccccactactacattttgtgactctatgagcccttggataggggcactataaaaagagcctgtcttcagacaggcaggagtcattattttccccctccgttaccaaatcgtgtaaggtagaatcagaccttttcaacgtcatgcaaagagatgccctcaaattctggatgaggttggaaaacctccacactgaacacttggtcagtttctacaatgtcagactgtcattcagtaagaacgtaatctactagcactcctttttgtcagataattactaattatgatgtgataggctcttgctaagtgtttgcagatatcatctcatttaattatcacattcaatcattcaattggttggctggggtaacactcatttcaaagattcagaaactgaagttcagagatgttacacagctttcccaaggatgtgctgttagactgggtagcaggatggaagccaggtaagtctaatctcaaagtccatgctgtctgcaacttctgggtctaaatttcagctcatcagtcctagcaggcaagtaactttaaaaagaggacactatgcaaattgtgtgctatagttctgctgtaattctgagcctttccatgggggctagtttcagaaagatcactcaggtccacgtgatcaaggcctaggcatctggacctctcaggagctcatcaatggcctgtggctacaacccactgggatcccaagagagagccttcctctttcttcttttccatccagatttggggcctacatttttcacagtaagcatggccaatgagcccaaaggcacatctgtgtttctatagagcccctcttcatgtgcataaataaaataagaaatagccaagtagacacctgtgtatacagtcacctgcttttgccagacagatatttattcattgttgtataaatgaggaaaatttgcactcagccctgaaaatttggccacactggatcatccttcctcctccccagcgatttcttcactgagaatggccacagttggttgacacttcattgtactctgtttaaagatcagcgcacaggcctgggaagatctgttttgcacctgtatgtgggtctcataaggtgctcaagctgtcaggacaatcctgtgcaccagtgctaaatcatgtcgtacatgacagggaggaagtgcttttaaaggcaggtgtctaatcctgtcacacattattttatgagatggccctttaaaatagattgtgtgtaatggggcttgctttaaggaggtcggcctgtctcactggactgagagcagaaaagatataaaaacaaggcaagaacataaacaaggaatgtcaagttctacccacatctttaccccacacacagaaagaaacacccacagaggaatgttaagatcctgcctcagcaaactgcaaatgtttgatttgtgggctaccattaagctgatggaagaatatcttattcagggcattcttgtaacaggtggatgacggcaaacagcatttcagaatggctagggaattaattatatttcttagctagttatccttttaaattaattgaaatagtttagtcaattctcatttaattgcagaatttctagaactcgtaaaagcaatggcattttaaaatgccttttgaaaaatctttctgtgtttggaaccagcattcaaatgccatgtcacttcttagggaatggctgaggggctggagcgggaaaggctgcactgcaggtgagctcttgaatacttgaagcaaaataagagaaaacagtaaagcgaacacatggcatcagaactgggcctaagtcctatcccctctggggacgtcgtccagcactggctgcctgctcacacagaggccctcatggcattagtaagtggcctgacttctggggatgcctcatgccatttccagagctctgctagggaattaaattctgatttcttgggcttatctgtgttgcattctatgcgcttaaaagactatttgctgcttcttagcacaagaatccctatttgggaaacacagcacatgaaccccttcttagctttccaacctccttcttgcaaatctgtcccccttgtctccaacttgggttctagcccctgtgctcctgtcccctcactaacttgcttcgtccactataggctcacacatgctcaaggtatttctaccaacatcctcttcattaccctccaagctgtgcctcgcccgttcagtgctggattttttttgtgccttaaggagtctgccagtgcttgccaatggaagtgccctccagcaaagctggtattgaggggagataggtaaacaatgcatgcctcagcaggaatggaatgccctgtgcctcactcaggacccgcatcttcaaaggtgcatttgtaccctgagctggaacagaggggagcagagaccacatagtgggagaaatgggagcagaggtccttatcattggacagccactgtagattctaaagtaagaacaccggtgtttgaagtcaatattggactgatgtggataatgcactaggacgggcagagactagcatcaaagaagtcactgggggactgcattccagggcacttgtctatggggatgggaacaaaccttgggtggtggacacagaaaggcagagtaagttataagttgaaaaggcatttaaaaatattttaaatttctgttttattcataccctgtttttattaagtaaatgtaaaagaagtttataaaatacgtgtaagaaaaataagtaaaatagataaaaggcataatggcaataatacagcaagcactcccgacccatcaaccagatgaagaaaaggaacagcagcagcagcttggagggatcctgtggacacctcaggcatctcatttcattcttcacattccaaagttttctcaatagttttactgcatatgaaagtgtttctaaaatatagcatctagtttttgtatattactgagtttacatcatctttgcagtcacttgcttttctcacaatattatgttcctgaaatctgttcacaatttccatgaagctgtcatttatccaatgacacaaatgaaaaattttgctttttccagatatgccgcagtttactttgccattttctttttgtaggcattttggtccttctggtttgggtgtgtgtgcacatgtgtgcacactcagcatcaaaatcaaagctgctatgagtgcttttgcacaagtataaaagcttgcatttctctatggaatctatgcagagagtagaaatcctgggccctgagttattggtcttgtttgcattgccaacattcctggataaaatccaattgtctgcatggaagctgtagtagttgacaggttcccagcactatataattgctcccatttattcacactcttgctaaccgtctatactaaccaaagtttttaacctgttttagctgcatgaatgtgaaatagtatttcatttggttttatgatttgcagttccccttttcctaatcaggttgaacttctttcatatgcttattagccatccaaattttctcttctataaagttcctcttcaaatgttctttttattcatctgttgggttgttttctttttttttatttttgtggacattcttggcataatttaaatatccaatatactaaccctttgtcagttacatgcactacaaggatctcttcctagtctgtctagtctgtctttttattttgatttttttcacattagttattaattaaaatctaattaaattaatttatctcttttcttacagtttgtgtttcttatgaattgtttaaaaactccttcctattgcaacgttataatgatctcatattatctgctgaaagtattcattttacattttcatatataagtgtgcatcaccatttgttgttgttatggtgtgaagtacagtgttaacctcatgctctttctacatagatgatgctatggtctgaatgtgtctccccaaatttatatattgacacttaattaccaatgcactagtaataagaggtggggcctttgggaaatgattgagtgatggggagagccctctaatgggactagtgatgtgataagatggctggagagaaataacttggcccctgtcccttccccctcatgccatttaaggatatgcagcaaaaagatgccatctgttatgcagagagcagcccttaccagacactgaatctgctcacaccttgactttagacttcccagcctccagaaccatgagaaatacatttcttttgtttataaattacccagcctaaagcatttcattatagcagcaggaatagactatgatggatgcccaatcacctttacatcattggttgaagtgctttctctccactaatctgcagtacaagctctgcctcaagtcagggttgcttatataatcatagatatgtttctagaaccgctattcagttctgggattttttagggggagtctatccctacattaatacaacattatcttagttactttagctttagacaatttgtcttattttctgatttggtcatttttcctacaagtgtgtgtatagatattttttaagtaaatcttcatgctttttaagttctgtgataattttgaatggaactgcattgactgtagtttcctagatagcatcagcatttcttcccaatctgtaaaatgaagattctagtggaggtatttttttttttttcccaggcattgaagaaaaagggaacagtgggccaaatacctatgggtgattggccagcaagcttaagccttgcttgtataaacctggagcctccatagtgtcagtgtgacctttgggcagaaatggagaaatatattaagacaaagccagcattcaaaagggagccaatgtcaaggaatgtgagataacagtacattctagcaataatgttcacttgttaagtagacgctatttgtttaataaaccattaatatacaataatattacattaaatcaaactcaattcaacatttattatgtattttgttgaaaatattttcacaagatacatcatataaaaaatattttttcaataaattatataataccgtaaagtttttaatgtttgaatgatattgtgtctgtggtggagagaatgttggatttttattttctggcagtagaatttatttaatctttataaaatgtagtgtcttcatttggaacattgggttaataatactcaatttttgaaagtttgataaaaattaaattatataatatatgtcggtgtcttcaaatgtgagcttcagtttaagttattgaggcttttgtccaaaggccccctctgtggaagctcagtgtgtacatttgtgaatggtgggttcctctacggttactcatgcctccatcccctccctcatctgctatggagtctgtatcctcccagtgtctcttggaatttgttgtgtaaaagaatcaaggtaatgaataagttaagagtacaatagaggagaggaaattgcagaagtctatgggactaaattttcttttgttttgtttgtttgttttttgagacagggtcttgctctgtcacccagactggagtgcagtggcatgatcacagctcactgcagccttgacctccagggctcaagtgatcctctttcctaagccttccaagtacctgggactacaggtgcatgccaccatatccagctaatttttgtgttgtttgtagagacgggattttgctatgttgtccaggctggtctctaacttctgggtggtctctaactcaagtggtccttccgccttggcctcccaaagtgctgggattacaggtgtgagccaccacagctgaccaatggaactaagtattttaataggaaaagtaaaattgctagttaaaaatgaaaggatatatcaagaaagtaaatgaagcagagaaaaacagataagaatctactctgtattcaagagagaaacttttttattattcagacaagaaaacgggctctggtgcaactgctgccaattgtgagcagaattaaaaataggttttaaataatctatatatttatatataaaacacccttagggcattgtttgagaaaatgaagtaaagatttaaaatgtcttctctttggattgtgtttctttggttgctattctttgccagaactggacctcagggtggctgactgttgctatttttcaggttatacaagggtcttttggtatccatcataggcggctggttccaggacccccatggatactaaagtctgaggatgctcaagtcctacagtctaccctgcggagccagtggatacagaaggtgaattccatgtgagactcacgaaggcagttgctcttattcaatagtgcttgaggatttgagggcaggtcttctcaggagttgctggaaacattaaggcacaaagcaggcacagttaaaacctgcggtctacttgaaaacaccgtaaacttgaaagtgacatgcacatgaagtatgatcaatcatgaaaattggctgttgcatgcaaagcgctcttattaaagcgtgctctacatctcttcgaatgcttgttaaaatgcagtttcctggacctgaatcaactctaccaggcttgctttttcagcaggttccttggatcattcttatgtgtccccagattttagaaccacagtgtcagtggaacagggaatttggaagccgacagaaaggcttgcgcaggtctataccccatcacaaacagtaagttttgtggcttgcatatcttgaaataatacatgtgaacttcacttagctcaagtgaaaaccatttttcccctgtcctcaatattcctgaaaaagcaaagagttattgccgggatctgcaagtccatttgtgcctggagtttgaatcaatactttggtttgcacatatgcgtactataatttgtcaaatgtaagaggattttgttgctatttgtaaaattaaaaaattaaaattattgtatttaaagaagtagaaccacaaattataattatgtgaggattgacaaaaaattttaaaaggatttctgaggtcttttttttcctcctaattagggagccacccagtgtccctggtaagtgtaagctatcagccagggcagaattccaaaagagacacagccccagatattgccctttaatgactgaacaggcaaattaagtggagctgactgatccatggatctgtgtggaactgcctggccacgtgttcttggcagaggggttactcggtggctacttcattgcttccagtctcttccctatgccattccagaggtgcagtgacacacacactgcagaaatttttgtgacccatttattcatttaggagactcgaatgacaccattaacaaaaattaggggtacaagcaacatgcagcaaccattcagtttggtctattccttgatttggagaaatctggagatgaacttttggaattttctagtactttaaaactttggccaagcattaaatggagtttaaaagtcaatctcttcagtagtagagtgaaatcacatgaatagatttatacttgatttttaaaatgtcagtctacaaaaagccaaaaaacagagggaaaaaaacaaggttgcagcaggtgaaagagtttcctgcagtccatatcagatgtgagaaagaagctgtctgcctcttcaatgtgttaaaatttggttagagatcctcccacgctgtattagcctgttctcatgctgctaataaagacatacccaagactgggtaatttataaaggaatgagatttcattgactcacagttccacatggctggggaggcctcacaatcatagtggaaggtgaatgaggagcaaagtcacgccttacatagtgcaggagaactcccttttataaaactgtcggatctcgtgagacgtattcattaccatgagaacagtatgggggaaaccgcccctatgactcaattatttccacctggccccatccttgaaacatggggattattacaattcaaggtgagctttgggtggggacacagccaaatcatgtcacatacctacaactgaaactattagaggttaaaagttttaaaattacataaaacttcagtgagaatgggaagggattttataaaactgtttgttgttcttcccttcctccccatatattctctagcgcacacactcatatccccccccccccacatacacacacacacacacacacacacaccacagacacatgttgccacccatgaagtaagagtcaggatttttttttctttgaatatttcttttcctccaggaaatggtagaggcaaaacatctctaaaagagttaaggatttttaagacttaaaggtgtaaaggatagtagttagttctgattttctttttcctctttttttactcatgcgcctaaatgttttcctaaacttggagccagaaaatgaggaaaagggaaacattctcatgaaaacaaatccaacctccgctcaaaatatatgtatgaaagttttcctcaaaccgatttttctttttagattccaaaaagctcattgagttggctttttgagcaatcagcgttttccagtagcaagcaaatttccttcccagtgggaaatttgctgataaaacgactggaaccagtgcgccacctgatggtctttccacacatttcagtttactagaaaaaggcaaaaaaaaaaacaaccatggaaattccctttagcaaatgtactgtattctaacttgagtcagggcagagtctcatagattaacagttgctgcttaaactaaatattcactcactttatataaaacaaaaactattttatccatgaccttcaatctgaatcctttattagactaatttgttaggaaatactaagttgatctagtttgctgataattttcattttcatttttcagttacaggcaaatattttaaaagtacatattagaggccaaaggacgttatccaacatcattcccaacccccaaagtaaaataagccctcaggtaatctagaatcagccttccaaatgtgggagttgcccaaggtcatttcattcaatgtgaatcaaaaattaattgagctcaaagttaacaccatcaacagacatcatgaggatcctagaaagatgcactgagaagggcccaacatcacttctgtgggtttcgtgccaaaaatgaaagacactggagaaatccagggagtaacaacctagaaaataactggcctctgctcttcaaagacatcaaggtgaagaaacacaaagagatcctgaggaaatgttccaaaacaaaaaagcctaaagagacattaacccaagtatgattggatcctggactggggtaaataggaaaaaggacattgtttggacaagtgatgatatttgaaaatggacttgggactaaacaatagcattctatccatgctaaattttcttattttcataataatatgatggcatgtaagaaaatgtctttggtcattggaaatatatgccttaagaaaatctgcaagagttgaatcaacatatggatacagagcattgaggtcactttgcttgtaggtggcacaaaaagaaaataggtacaggtgggaagtcccaagtatcatgttttctgctccctgtccttgtctagggctgtctggctaggggctgggattcttggtaagatctgtcttagagttagatcttggtagatgagatctatcttatagatatggaagatcagcttctatatctcccgtatctataagaggaaatggatattctcccacctgctgtctttagcctcccttcctaggatgctctgaggatcaaagtagacaatagtctaaaggttaagaatgtgttaaacccctgtatggtagaaagcagggaaagagggagacagggtaccctctactgatgaaggttccagtagctgggagagagaaactatctgtatgtttcaggaagtaaagtcagatataaaaatgcaaccagtaattagggatttgtatcatgtatgccaactataattctcagtttcaccatatttctctcaacattatctcatcagatttgtacaatgactttgcatatgatgtggaggaagtactataagctacattttattgatgatgacaatagagctcacatataaataacagcacctctattttgttttgtagatattagtcctggacagagctggtgtaagttaataggccaactgtctcatggacattcacagctccttggtttgatccaagatgatcccttagtagaggcatcatagttttgcagaaagagctgtatctttgaaatattccaggcctggattggcatgtcatgtgtaccacttcctgagcatacagacttcagctggggttgctctacctctctgaatctcagtttccccaagatcttgtgcttttaactacactgcatgtccataaatgttacaagcattgttttgcatgtgtattcattataatttgttgtaactttattgaagtataatacaaatatggaaaagggccatgtccacagtgtacagctctgtgcacttccacaaagaacaaacttgcgacaccatcacccaaatcatggaagcaaatgccacccagaagccctttctctggtagtattgtctggtagtattgacaccataagtgggatgttactgtacacatcattttgcaatttgctgttttcaatcaaagtcatgtttttgagctctaaactgctgtattgaatgtagttcaaattgagaaaaatcatttatctggagcattttcaacagcttatcacttaataaaataagataatgcatagagcggagaaggcaggagagagaaaaaaaggagggggaggcagagagggagagagacagggagtgagagaatgaatatgctgagccatttcccccactgccaagcacagtaagtccttctgaccaaactaggggcagccttgtctgtggctgcctgcatctgcatcttcacacattatgcatgtgaaggataatgttctggaatgtccactcacatgggtgttctctggcaggtcatttttaatccctgtgacctcctaggggaaacatccttcccccgtttcttcattgtaactcattttcagatcccagtggatctttgccaagcattttattatatttatttttcttccttgataaccttggcctttgctgatttcatagccaaagtggtagagatgaaaatcctgtcggtggtcctggctgaggacactggagggcagtggggatcactcgattgtacctgtggtggagaggtgatccccagtctactttacagaagatctaaggagcctccttaggaaatgccatctaaagccccatctcaccaagcagctcttgaccacaacttgaagttacagtcattgaaagctcagccaagatggctcccagctccattcatgcttccttctgtagctggaggtcctgggtggagtgggggccacagttagaacccacaggaagtgtttgagctggtggtcaccatgacaggtgcagacatctgcctgcctgttcccagggctcatcctcctccctgcaaggcatggcacgaacagcagggagactgaggggcctctggggccggaacacctgagttccaaatcctgcagccacctgagagctgtgtgaccacagaaatggtgctgagccatccaagaagcaacttgttcccattttgcatgagaattcaatgaaatcgagagtataaaccacggatcacaaagcccagccatggtagacagagatgtcatttccttttctttgttccttcctttccgtttttaactcttctacctgctctttcctctttctcttttcctccctccctctcttccttactttttttcttctttcttcccttgttccctttcctaaaacaaagtaccacattgctaaatctaggtgctagattcatggatatgtgctacatgtattatctgtgtatttctaagtgtttagaatatttcataatttaaaagtaaaacatttaaacaatacccctccaaaaaaagtctaaaggcccacagtagacaatttgaagtagaatttgaaggtagagctatctgcaatatttccaagctctcagatgattgcattatgcagcacaagttgagaatcactgggcagtccctctattccaattgctaacttttggggagagtgattctgttttctccaaatgggatgagtgacccctgcctggctcagcttgtccccgtcaacatgggcatgccctggaggcattgctggggcagacatttgaagactttggaaatagcagagggaaaaggtgtccaccaggcctgaccatttgttagggtcagagaaaagtggttaattcaccctgcagaacactaaccaaatacgagcgcgatttatgcccccacctaaagcccatatggaagcatgggaaccccaggcctgggagagacctctgcaaagctccatcctgagtttccctcaagagaatcaaccttaagagatcagagtttcagagatgaagtctccttcattctgtgccagagttaacctaaattccttccactccccagaccccatcatgggccttgaccatgtaccagaggcctgtgctgaagataaaacctgattgcatttctgcctcctagagtctgaagaaacgggaggcatggggaagtgactcagatgaaagaggctgcatattattttctgtacagtggattccaaagaaaaacaaataacagaatcctatgtaatcaagaaaaatattacagctaaatgttagactcaactttagctaatctgtcaatgagagaaaaaagcaaaatcacataggagtgttctattgtgtgcagccccaataccatcacaaaatgggttttataaaaatgtgttgatggccaggcgtggtggctcatgcctgtcatcccagcactttgggaggacgaggcgggtggatcacctgaggtcaggatttcgagaccagcctggtcaacatggtgaaaccttgtctctactaaaaattgaaaaagattagccgagtgtggtggcctgggcctgtaatcctacaatcccagctactaggaagcctgaggcaggagaattgcttgaacctgggaggtgaagtttgcagtgagccaaaatcaagccattgcactccagcctgggcgacaggagcgacactccatctcaaaaacaaacaaaaaacaaaacaaacaacaacaacaaaaaagtgttgatgtaaagtgttgatgtaaacttggactatgttcaggaattagaggtgtgcaaatgacatgggattgggagttataaagcacaatctaagtcgggggcggggagtaatgactggaatgtactagttgtcttgatttaagctagcaaatggttttagaacattgttaacaaaagaaaggatcttttttcatttttgtttttgtttttgagacagagtcttgctctgttgcccaggctggagtgcaggggcatgaccagggctccctgcagcctccacctcccaggctcaagtgatcttcccatctcagccccccagtagctgggattgcaggcacgcaccaccacatccagccaattttgtattttttgtagagatgagttgtcaccatgtttcccaggctggtctcgaactcctgggctcaggctatcctcctgcctcccaaagtgctgggattacaggcatgagctgctgctcccagccatcacaagtatcagttaaatagaggaaatattcataatggtttcttgtttttagtcaagattttctttgattcagatattatagaatcaatttttgtgcttttgcacgatattggtgagagcagtgaccacgttcaagtgttgtaaaaagaaaagatgtgtgtgtgcctgtgtgtgcttttgtaaaaatggctttgaggagaggggcacattctgccaaatatccttcctttctttttaacaaaagaggataagtcataatcttttgcttccaaggttatcaatttccaggtaatgttcccagtattggtcatgttactctcggctggaaggcactgggggacatcaggtgtgttccaactgaagatgggtgactccagtagctcctgggtggtcttctctgtaggttaaagctcttcctccagatggagctgaacactgccagtcatcgctctctaagtcaagtcctccagtgcggagagctggagcatttgagcattccttttcttctccatgccaagatctgagtttcctgtgttcctgttctcacaccattcttctctgtttttccacctatttcaacaaaacttaaatctgtcaacacttggccatgccctctgccagtgtgcggtatttgggttttaaatgtagaggggatgttcaactaaaaaatcaataaataaattccctactgcctctccaactggatttgtgtaattgtgtcagacaaaatcaagtgtgtagatgagtgcacattgtttgtgttgaaagacggtttccacacacactgaaaataaagtttgaactctttatggtctgaaaaatgagaaattagaggagaccactgtttgaggaattagcacctcatactttactgcaagaagctaaaatcaggaggattttggtgtgtgaagaggtcttcctttgaaagtggtggagctttgtcccagctctgtccacttagacgggcttgaggaaaggaatcccaaataataataactacactagcttatagatctcagttactaaattccattctcctttaaaaggaatcagagatctttagagaagtggttggggaaggagagatcaaaatgagcctggaacttcactttgagccataaagtaaagaagtaaggaaagattgatggggcaggcagtatgagtctactcaggctgccataacaaaataacacgggcttggtggcttaaacaacagacatttatttctcacagttctgatggttggaagtctcgatgtgcaggcagcattggtttctggtgagggctctctcactggatttgcacaattttattaggcccagaattgggatgggcctaaacaagtaaatgtgttctcggggtgtacagtagaccactcatgaagtggtctactgaggatgtgtgctttttactcttcatgaattttacctcaaagaagaaaaagaagaatgaagagaaagaggaaaaggaggagggagagcaggaggagaacaaaagaggaggagagaaaggaaaagtgtaaacaaatgagctctggttaatgatatgattgctgaagtgtttaggagtgaagggcattaacatctacaacttaactttaagtgcatccaaaaaataagatggactgatggataaacagagggatggatgtgtgctaaagcaagtaagtatattcaaatgttaatatggcataggtggtgggtagacctgtgctcactgcaatattttttaaatgttttaaatttccatcttgagaaaatagaggtgttctactaagataaaataccaaaagttcataaatctgggctgttacagcatcaagcaacatatggcatttgtccaaaagcaatctcagtccatagagttcttcttctccttccctaacataaaatctttcttgctctgtttagttgcataatcaaattctaaagtcaaacccagatattttatggtattttgacctccagttagaatcacacaaagccttgtatctttctccaataaactttatttttaatgatgttatactattaataacactccattaaaatatacttaacactgggcagggcagtgtctgctttcttccctgctcttgccctgatgccagaacagagcctggagcccagtcggtggtaagaattctttggaactaaaaaattaaatgaaagcatgaaaaatgggatttctgacaagacctggatggcatctgctaacaagcgtacagcaacaatcacaatttctgtctagttgagtgtcaagactaatgaggattagaactaagagtggagtctccaaaaatttattattaaatcattcaaaaatatgtatcagcttacatcctactttgcacaagacatgccatcaggcatgtctggatttgagctcacagccgctcactgtgtcatctggaataagttgactaacctctctatgcagcagtttcctcatctgcataaaggaaacagcaagaattgtcccaaggtgttgttctgaagatccattaattatttctgtgaataacttggcagaaccaggcacagagtaagagttcaaaaactggaagatcttttaaggtaacaattctataataatattagagttcagatgtggaggtgatcacaaagccccaaagatgagaaaaggtgagtcattcaattgacatttataatcagaatgctttgggaaaggcccttggctatgtgtttagccagccctggtagcagaattgcaagatgtgaccagatctgcagatagtggccatatgtcaaggacaactcacctgccatcgagcatccttgtcctgagccttcataatgcagtgtgtgtgccagggggtgtggagctgctggttatcattgtgcatttgcatagctcaacggtatttgtagaaatgactgtttcaaatgtcagattcacaaatgagcaagcataggtacggcagtcaaaatttgtctttggcctttcccatcttagcttttgctcctctcttttctctctttctatattccttgtcctgagtccccagtatagaaataagagacactgctttttttgaagcacaaaccatggaaaaatgaggccatgtattctagatcagtgattttcaaactggggtactcaggcccctagatgaatgtaaacattttcccacagattctccttcaagggaagtataagaaaatcaacttccatacctgtactcccattacaaagtttcctaatatcaaccataatgctcattgcaattgcccagatcccactccattctgaatcagactatgctgccctactcctgagtagaaagccctccagggcatcaagcagagggaacttccattagggcatatcagccattgtaaaactcatgtgggattactatctttccctggcttctcttaggaatgaagattgcattttacaaatattgcacgttgctaaaagcacatatctggagacttcctgggatattctgaattacatgtgatggatgaacagggtatgctgagggaggatacctgatggtgcagatattcaaggtcagatgggctgtatcatttgtattgctgatcttgaaaattaaaaatgaaaaaacttttcccacagagatcggttgtaacatttgcttaatttctttcaattagagtatcaaacaattgctcacaaagactgacaccccaaggaaggcctccttcccctgctttttaccaccgatgttagtaagcatgctgcacagtcatcatcacatactgatttgtcacttgaacttgattgacaagagacatagaccagttgtgtgtgcacgcctaattttatgggtgagttgcatggcttgtgatgattagacattaaacaaaataaactctaagtcccttgagaggaagatctagttttatttcacttggtttcttgcagttattcattctcaataaacagtttttaagtaaacaaattaatgaataaatatattaccaatataggaatgtgcctgagtctccatcatacaacctaactctgcagagaataactgaaaaacaaaaagttttctattcttctagttcagtttcatttgtcttaaaacaagatcccccgcttttagctagttgtgtagtgctccctgctcattttcattgcagctaagatattctatttctgccaaaaggcattattgacctattttttcattctcaatgaccagaaagttgctaagtacaagctcttcatttcttgatgacactcttcatctcttagttgaaacttcttagaggtcagctgggattcattgctagtagagaccactgccaacttaggcacaaaccacaatttaaacaaaaactaagagatatgagggtaaaggatggaagtgatgctgggtgggggagtaagatattaatttcccaagatatgcttggccatagcactgagcagaattgaccttgtttttttttttttgtttttgtttttgttttttaataatcaggagtgtttttttggttttgtaatttcctaaataagacaccacagactagttgaaagaaatggattttgcaacccaaagaattttggtttgaagatcactaccaacctcacggtgaactgctggaatagtgagaagttggtgagacacctgggtttagaattctgactcagctaaattattttgggaaattgggtatgttttaaacctttccaaccctgtgtttccttatctgtaaagtgagaatacgtggtataacttctcagaaggtttggtagctcagtatctgacacatagcatgtactcataaaggctgagtgtccattttaaccatgcaaagggttatttagcttctctgaccttcacttaccttctcaactcctccttctacttgcctgtacaatactgtgggggcaatcaaaatgcattcaaaggtgtatggcacatggcgactctaacagaaagtaattagtaattattagtaatcttagtaacattaataatactagtacttttaaatttaatgctaattaatacaagtgttagtgctggaagttctaataatcatgacagtttgtaggtaagagaaaagatgcagccaagacccacatctggtcctgaaaaatgaatatcagaagtttgttttattattttgcatttttcaaatcaaatgaaaatttcctttgactctcaccgcttctattttccttcctgccctttggaagccattaatctcctattttcagattgattttaaaaagccagccacaatgccagtgcctgccctcattcctctgctgaagtgatttcagtttcctctaaaatattagatttttcccttgctcttatttactatgcacagatgcagaaggagaattactcaagttttgcaataaaaataagcttggctttgtgagcacctgctttccgctgtttaataatgccgagctccctttttctctgtggttctgtttactcttctacaaattatttttgttctcagttgacaaagataaatgatgggattaatatatattgaagaagtctctgtgagcagtatgccagcccagaggaagggtgggtattatttccctcaggtaaggaaacacagcaaactggattaagagtaatttgctgtggggcttatagatgatcatgatccattagtggtacaccatttatgaaaattgctttttcttaaataaaaattagaatgactttcactatcttgtcagaactgagccaatccaactgcattttcccccaagggaaaacaaaatatcaatggcaaagcttagattctttttatttaaactcaaagcaattttcaaactcttcaaagtaacagtgaaaataaactgtatggcaaagaactctattctctaacgtccaggaatactgctatacagttaagagttgaaaactctaaaaaaagatgaaaagaaaagaaactatacaaaaatacttgaaagaaaaatgagtaaagtgaatccagtgttgtactttttgatcatcgttattaaaattttgcaaatgtatgtaatttaggtagcgattttgcaaaatgtggtgtgagtgaagacattcaatataatggtatttttgttttcatcttacggaatttctttgagtaatattttcaaacaacaaattcaaaatgtacctaagcatctcctctatcttggcatcccatttaccaagcgcagtgactcccacagctgagatgaagcacaatcaacacaatcttacattaccaggctgccctaggacagaacattttcatcttgttaggaatgtattcgtttattgttgtgcctataataattgttaaaactttttaacatttgattagttttttaaaaaatgcattaaagatgagtctaaaaagtgtcaaaatgctcattatttagaacaatgaaaaaaagttttgcctttcctgttttaatttgaaatttcttttgccttctttgttttggtgtgtggatgaagtagccttatttcttatatttccaatttgcatcttggggtgggagttgctatcaggccaacatcttcaaagtgaaacaaaaagaacgcagggagcagttatgtcttacatcgtactcaaacaggccttagttttgccaagaacaaaagcagctgtggatttggaacaagattatgttatgggtggctgcacagtcatggatctctcatatgagaattgagggtgtggagcacatttatgattcagaaaggagaaagaaggacttgtgtgttcaggaccttggggtaaggttagaataacacacttttctatctcaagttaaccaactggaaattggacttctcttgaagctagagaatccatcagtcacctgaattaaaaagaggtgattctaaagctttcatcaagacctgaaaccttgatgccccagaaattggtgcattggtcgggtatggccttagtggtgctgtggagtggatggtgttcgtttgtgagagcacccactcctaagtaatagtgatgggggcccctgtgttcaacaccttgctcctgccttttcccacatttattcagctcacagacacataaatctcaaagtcacccacatccacactggcacttgtgcccaggcgaacattgataaagtagactctgcttcatggactctacccacaggggggaactggatggaagcattaggcagattataataagcctcacaaaatttggattcattgattttgtaactttgatggcacccaaatttaccaagtcttgtctggatccttaggatatcacaccaagaaagattattccaaataggtctacaggtaatcagttattctcaaagccagttgtctacaactgaatttcccaaatctgtcctaggaggtttggtcaatgcccaagttaatcagataccttcatgttcatcggaggctaagagttgcctgttaatataatgcctgagtaaacaggtggtgttaactatcatagtgatactttccccctccttcataaaactttaaaagtcaggccatttagtattacatttatacaacatgtaaggacagactggaacaaatggaatcttgtctagttgagaaatattaagttgttctctataccacctttccacaagcaagtaaatcaattcaaagcattccatccaagaaactggaagtctcttgatgtgcgtagctgtgatagcaagattataaatgggaaaaatgaggtatatatttgagaacagttcccttctaacccctagaattcctaagattatcactcagtggtcaagatggtcatagaaatatggttctcatggggaaaccagatggcgggagcagggttcctgaagagaccatcatcaccgttcctaaggagtgctcttacaaaccaacagcacccactctactctccacccagttaattctgtccatctttcagtttattgcaaatccctcacctccatgcagtttcccctgatccctgcagtgggccaggcctcctggttacctgctcccatggcaccctgcactgctcctggtaatacttagcagaggtgtggtaaatcattactagtgtaagtttataagcaaggtggggatgggggtcttgcctgtattattttcacacaatgtttctacatcatagattctcaaaaaaaaattgtttaataaaactaatggtggataagtgagtgaatgtgtgtgtgaacaaaagtcacttatatgtaaatgtctgacaaggaagagctgagtaaatgtatattttcatctttcctcatatatcacagtgtgggggacaactaacccctctacatggatattagaagccaggcttggttggctgctatggaacatgcaaagccatgtggcccagtggagtctacagagaggttcatgcaacaacttgcccttcagtcaattaacttttctttcagaaaaagtcccaaataaattggaaacactttggaaatttgcacttgcttcatatgaataaaacagaatgtgcagtatttttctataagaaacccttacctgaggtcaaaggaatcttaaattatttttaaaaaatgaattctttcttgcaacaggactacatttaaatcatgataaataaactgaaaacataaataactccatttcaagggaagccctgttctacccattctaccaccaggctgattctacttatgcatggaccagatcctttcttctgcacataattacatctccaccctggcttatcaaagatggagactggctggttgatgattatgcctaccttgaagatgttcctgggctttatctttttttgtggttgttccattctgttcttagaattctttgatcttattgtatattatattatctccagtattaggtcatattgggccataacattgtcattattattttgaattctactgagatcttgcaaaattcatgagtgccttaaatgttctatgcctctgtaagcttttgatatagttctattggtattgtgatggcagtaactgacttggcattgatattggtatgtcaggcgaggtagaaagggcactaaattgtggactaggctcctgctctcaattcctacctccaccgttattgccatggaaccctcagctctctgagcttctatctcttcatacctaaaatgaggacacggactagtcctgaggtttctaaccctggcagctcattgaaatcacctgtgtatgaattaccctgcaggctccagagcctaccccgggagactgggttcagttggtctgggtgggaaccagatggactggatgtgatttgagggtacctgcagctaagagctcaagaaatttagaaagatgaggatctgggtcaactttgtgggtgaagttcacttaaactggactttaaaatgcagacaagatttcaataagtagaaatgggtgatggtctttgggagaaattaaaaaaatagaacatgtagaacatgtgcatggatgtgaaagagtgaagttttgtcaatgaaggctgggtgtggtggctcatgcctgtaatcccagcactttgggaggccgagacgggtggaccacctgagggcaggagttcgaggagcccggccaacacaggaaaaccgtgtctctactaaaaatacaaaaattagccaggcttcgtggtgggtgtccgtagtcccagctacttgggagcctgaggcaggtgaatcgcttgaacctgggaggcagaggttgcagtgagtcgagattcatgccactgcactccagcctgggagacagaccaagactcaaaaaaaaaaaatatatatatatatatacacatatatatatatatatatacatatatatatatatatatatatatatatatacatatatatatatatatatatatatatatatatatatatatatgaagtttgaggtggattgaccaacaggttccttgcttttctggacagagtgtttcttgggagtaagggacacactagaaaggctacattgatccagcaactcatcttagtggatttaataattcgggagcatgaggtgtctcacctcacatggttccaccttggactgacctccccagtctctttccatctttctttctttgcccaggtttcttcctctttatttttaccttattatagtgggactgttttataagccacctcaaataaactttatttttggcagaggatcacgagggtaaactaatcatttttttaaatctgtaggctacaaagaatttgggtttatgaggtctgcctgggatccaactgtactgcatgtgattgcagggcacattcagctgagagctcaagaaatttacaaagaggatgaggaatcagagtcaactttgtgggtgaagctgacttaaactgagccttgaaaagtcagcaaaattgaataggtggattaattttaattcgcttgcatgaccattgcgctgaccgtgagcccccagaaggcaaagcgaactgaatttgcctgagtctccacaatcagaatagtgctgggcacctgaccaaaccccacaaatgatggaagtataaatctgagagcaggaaatggacacgggtggagcattgtcatcatgcaattccccctccagatgaactatatctctcatctccttaaaccttgccatagcccttcatacagtttggctgtgtccccacccaaatctcaccttgaattgtaacaatccccatgtgtcaaaggcggggccaggtcaagataattgaatcacaggggaggtttccccacactattctcatggtagtgaataagtctcacaagatctgatggttttttaagtgggagttcccctgcacaaactctcttgtctctcaccatgtaagacatccctttgctcttcctttgtctattcaccatgattatgaagcctctccagccatgtgaaactgtgagtccattaaacctctttcctttgtaaattacccagtctcgggtatgtctttattagcagtatgagaacagatgaatacagccctgcagcaattggtctgattaacctgaatctcaccatttactctcagacctcttctcttctcactttactgtggtttgactctaggtgacaaaaaccaatctgtggtatttgtctctgtgcctggcttatttcacttagtgtaatgttccctaggtttatgcatgttgtcacaaatgacagaatttctgctttttttttaggctgaatagtattccattgtgtatagacgcccttttgttaagtttattcctcactgatgtgcgaacttcggctgtttccgtatcttgctattgtgaatagtggtgcaatgaacatgggaatgcagacatctcttggagaaactgatttcatttcctttggatagaacccagaagtgggattgctgggtcttatggtaattccgttttcagctttttgagggacttccatactggtgtctgtagtggctgtactaatttacaatcccaccagcaacatgcaagaattccactttctccatatcctcaccaatatgtgttatcgttcccccttttttttttttttttttttttttttttgcgatggagtcttgctctgtcattcaggctggagtgcagtggcatgatcttatctcactgcaacctctgcctcctgggatcaagtgattctcctgcctcagcctttcgagtagctgggactacaggtgtgcaccaccatgcccagctattttttaaaaattatttttagtagatacagggtttcgccatgttggtcagtctggtctcaaattcctgaccttaagtgatccacctgcctcggcctcccaaagtgctgggattacaggcgtgagtgaccacgcctggcctctttcttctttttgataatagccaaccttacagttgtgagggggcatctcactgtggttttaatttgcatttctctgatgattagaggtattgagcatttttcacatatgtgttggctatttgcaagtcttcttttgagaactgtgtctattcaggctctttgcctacttttaaataagtttatttgttttcttgttattgagtagaatgagttccttgtatatttggggcattagcctcttacctcatgtatgatttgcaaatattttcttccaatctgtgggttttgtcttcagtctcctgattgtttcctttgttgtatagaagcttcttggtttgatgcaatcccatttgtccatttttgcttttgttgcttttgcttttggggttatatacaagaaatatcatataatttcaggtatatatggaatcttaaaaagtcaaactcaaaatagagagtagactggtgcttactaggggctggggaagagggtagacaggagaaggggagatgttggtcaaagagtacaaatctcagttagacaggagtacaatcccatcttccaggattttaaatgttctcaccacaaagaaaggataaaatatttgggatgatagatatgttaattagcctgatttcatcatccccaaatgtatacacatattaaaacattatattgtaccccataaatatatgcagttattatttatcaacccaaaatataaaagaacaaaaccaaaaaagctcatccggattatctactagttctagcatgtaacagcctcctatgtgccagcctaaaggaacagctgttgacattctggaagctgagatggggtctcctgttctgctcgggtcctgcgttgtgcgcagcctctctgggcttggtgtggttgtcctctgcttgcttgtgcagtctggctggatactaccaccagccccaggctgctttgacttgcccccatccctgaagccattccccttgcctgcagtaattctgcttccctgctaattcctatttgcactgagtgtttcagaaggcaacccagaaggaaaaaaatcaccccagctaaggttgaactggttagggatggaactcaaatcaaataagatgtcacatgtcatgaaacaaagatgaataggtagggatcttctactgtcctgtgtggcctcaggcccggccagcactctctcttcagtggagctaaagtggtttttcttgagcctcctccttttggtccttccttggtggtaaaccaggctcctaaactcacgtaagaggagaagtgagacacagagaaccagcaaagcacaggcagtcaggaatgagagcaaggcacggagggaagtgacggcattgctggagcaggaagaaactgttcccacttgcccctcaaaatgcccgaatctcccaccttccgtgaactctggagaaccttcccactgtgaccttcctccttgagcagatttgcagatttgcagaattttctaagaccgtaactacaaccctataaagggtttttctcagatgcagagacaacacattaaagttaacctttatcccagttagacctgaccctctgggcaccagatgagcccctgatgccaggtctgaggacctatcctccgtgcagagccaggtgtggctggacagtctcacccgctcccctttctaagactccagggcatgagctgcaggaaacagtggggttaggcaaagaaatgatacactttagagccttcaggctctctgtttaatatcatataatgtacaaataaataaacccatttacattttaatgacaaaaatcataatgaaatgaatttacagcactaccagtcccacctcacgaggtctcctttgcagccatcagagggagcggagatgagcgctgtgtattctccaacttggtctagacattgatgctcccttgggaacacagaatgctggttaccccctggcacctttgcctcatggccctcaaccctgcctgtgaattagcatcatcagctttacagtggaaaatggagggcccctcccccagaggctttggttcagctcttctagggtgaggccaggaactggtatttttttaaagctcccaagtaatttcagtggatacacatcaacaccaatccttgctctatattctaggaatcagggttggaagagcctaggcagagagggaaccaaggcccagaggggttaagtcacttactcagaggttccacagcatagcaagtcctaaagccaaggctggagcctaagatgttgggtcctgacccagtggccccacgtgggcagctccctcagtccttcttttttttctcttttccttctaccagatctggaaatacctatggatataatgtggaccctttgtccttggagctttctgagccacatgttggagtttcatctccagagaatcaaaaccaagcttctgggcccagggtggcagagtcagtcacaggagtcgtcttccccagtgcagagcagttgggggtccatccatgccaaggcgcccaaaatgcctcagggaattgttggtgctttgccttcccagacccagagctttgattaaatttagagatcacaaaatcgtttaaaaaaaaaacttccattttccttccatttcaacccatcctgaacagtgaatctgccagaactcactgctggacagcctcctggctggttttctatcacctccaggacagggtctgagctctcggctgtggcccaccgctttcctctgtgccagccctccatttttgcttgttaccatacactcctacatttccaaacactggtgcccgccagcctgatctattgattgtttcccacattactattgctccagaatccagtgcctttgctcacaccacttcccgggatttagaagacttcactctccaggcagcatttctcagtcccttctcatcccatgcctccagctccaccacacatcctgctctggagaaggcttcctgatgcaaatccccctaactcacctcagggcctttgcagtagctctgctgttcagtattcctgctctttctcataacctgcttcttttaaagttccagcctcaaccccccgttccagtgacactgtcacatcaccccattttactttcttccagtgcacatcacgatttgaaatcatcttgaagttgtgtccacttgtgtgttgttggttttgccctacataaatgtagactatgtggtatccagtgctttctctgccttgctcacctctctatcccggcacctggcacagtgcgagcacaaagtagattctccgttagtattaacgcatgaatacatgagtgcaagtatttgtggccaaagtcagccaaatataattcctgtcctccgtgtcgtggcatcctgggtggatagaccagcccactacaagcctctgctcagtctggactaacatctgcttgttcatcatctcctcaggtgagtcctctcgctttaccaattggagggtcgtatctttcagagataggacgtagacatctggcttcactagggcatagcaggtgctcaggaaataggcaaggctaatacaagaacccttcccgtggcccaagaggccaaactctggtttgtgaggtaaaggacaaccactgtctttgcccactgtgaggatggactgttttgaaaacaaaagagctgccatatttgcaaaaacatttagttacaacacttttacactaacctgcataagaaatcatattctaggtcacaaatcagaaaactaggacacacaggccagatcaagccagccacctctttcctgatggcctggaaactcaaatggtgcttttgaatggttacatttgaaatggttatataagtacctagataatattctggaattttccctcttgacctaccagccgaaaatatttactctctgtattttgccaacacctgattgatttagagtattgaattatcttccaaaaatcttacaaaacagcaaaagctgtttaatgctgttgttcagaagatcaaatgtgcactggatgaagtgagcatgtgcagaacttattttcaactctagagagattgctacgttctaggaaaaggtctgctcaaggaacagatcatctactccacgatgcaaacaggttggtcacggtgagaacgcaggtgcgccagtcagaacgcggccagtggggaatgtcggactgtgcgaggaatcggctgcagaagagcatattcaatcctacacgaatgtgtggctgaaaatgccaatttcacctaggttcagcccattttttttcacccgtcagtgttaactctgattccgtgaggtctggcttttaagaatggcaatcctttccatcacagcacagtgcatgtttctcctgatggctcaggagacaccctcagacacagacgggacctttttccttaagatgagggtgcgctgcagagcggttatacctatgcgtgtccacgtgggggctccatagaacaacatctgtgttagagcccacttcaaaaccaacccacagcctctcaattgccagcttacaccaaatataataaatgtctgcccaaatctgtaatttctgtaaatacaataataaacgtgatctgatattttgttattgagataaaagagattttcaggtgagattcttctagccagaaaagccagtctaggagttagatttaaatgttatttccattcaggttggggaattcagaggaccggcttgaagtcagtcccctgcctgccctggagaatcagctgggggccaggggaccaccaccttgcttcctctggaagaagcacactgttagagtgcatcggtcaccaggcatttcatgccacactagggctgtcaggagtccaatatctaaaccaagtgatgcctgatctgaaataagagaacactctgagtggtcctaatttcaccagaagtaccatgtcaatggttataagtaaactattcatgtcgtcggtggcctggaaaacatttagaaaccttcatgaccttaattcttcttagctctttaccatttttatagactttcacttgcaaatctcatcttatctcataaaatatacatgcgatgatatttaaattaaaggaatttatcacaattaaatgactaatttcatatctggcccaatacttactgttcctttgctatctttcagaggcttgagttagtttactttaaaagactgtgtggggccaggcgcagtggctcacacatgtaatcccagtactttgggaggccaaggcaggcgaattacttgaggttgggagttcgagaccagcctggccaacatagtgaaaccctgtctctactaaaaatacaaaaattagctgggcgtggtggtgggcacctgtaatcccaggtactctggaggctgaggcaggagaatcccttgaacccgggagatggaggttgcagtgagcccaacctgggcaatacagcgagactcagtctcaaaaaaaaaaaaaaaaaaaaaaagaccacgtgctctccttccaacagcacagtctttttgaaatatctgaagcatgaccatgtgatgtaagcagacatcactgagctgtttccagacatcaattttttggtattgagcctcaacaaacctttctctcatccacctggtgctgagaagttatccaagagctaagacagagctctcattggggtccttgtgcacttttcagaaatgaaaacagatctcagaaaagtccattccaaccatattctgctatcaatggtatgtctgtcctgtcatggtcttatatttctccctccagtctgaacaaatgttaccagtttcagagtttttagaattcttaccagataataatttctccagccctctgggtttagaaaacaatacttgaggtaagctgtttctgatctcctgctaatctcagataattgcttttgggtttcatggggaatctgaaattctctatgccagattcactgaatgggtctatgggaaaggggcttttgggagacttttcacctctactaacaaatctgtctttagcagaggttctattgcaaaagtgtcctttctaccaactgccagcttgttgtaagaatcaaatactactaataggaactctagatattcttaatcaagtccccagcttcctccctccctccctgcctctctctgtccctcccttcctccctcctttcattttttctttccttccttctttttttctgtttccctgactttgcttcctctttctctctctttctcctttgtccttcctccctgtatttttttcttcctttatttatttatttcttaatttttacttcttaaattgtttaataaccttctgggaaacccccagaacctggctgtcaagtacagctctcttgttgggtgggtttgagtgggaaaagatatttctgagcttgaccttgcagttcctaggagagaatatcaggattatgttggtcccgctgagactgcggaacctcaggtaaagtctccagatgctctgccagtttccattgaattctctgactttcaacttggtagttagttcttagagcttacattaaacttagacgtcacaacctcaagccaagagttctgggggccaggcctttctgacaagttgtgaataagctgtactttctggaataaggacagaggcaccagaactctaatgcacaaagctcattgtagaaaaggctacacatcctaggcccacacgaccttgtttggaagtgcaaacccagctactccacaggctgtagcattctcttggacatggatgggtacacattctggaatggttcctcaaacctccattttacaaaactaaagctaccatcaagggttctattggccaagtcgtgtaaattgttcctggaggctttgctttctggggaaattcagatccatcactgcccctatctttgggcttcagaatgtttccacctatttgaatctattcccatctgtgtgctcactgcctggacagtgtggaggtttgggggactgtgtgtctccaggttggctataagttaacctagaatttaatttgggtctttggatgtctctttagagtaaaacttcgtggataattatgaaagtcaaagatccttgaaatgcctgctcttcctttgcagcctggttggttagatagactccaaaggagaaaattaattttgaggaataacaaccaaaacttagaatgtgactttgctcttctaatccttatagaaaatatgtaagatgtggactattactgatccccacttgacagagaagaaactaaaccttggagaggtttggcaaatttcccaaggtcatgaacctggtaagtcacagcaacaggatccaccatgagggtcatctcgtggcctgtcctataaaggccattcatttgcaggaaaggtctaggaaggcaaggaaaccaatgtttgccagggcttactgtgagttagatatgtctactcttgaacatgcagaaacaccagaaaagactattgatccagcaaagcgaaatttgtttcacctgctgcatttgcggagggcagttgggggagcctctgagcatagggtctcagaacggggaagtcaggaaaggatgtttactgggttttagtgagaaggcggtagtaatttttaaggtcgattttggaaggtgggaagccactgggtttgggcagagtttctgaccaactatagattggtagcacagcaagatgaaggaagtgaaatgaactagtgttagtcttgataaggaaacaatgtaattggtgcagagtcttaatttcaggagaaattcctggatgtgatttttgcttgttctcagcattgcaggtaagtcatttttgcttgttctccatattgtttaccaaggccatctgctttcagttctcaggcactaggggcagaccagtagctagaaacagacaagattcctgctctcaaggagccatgtccctgttaggtagccactgttcttattagacagtgtagaaaagaacgggagatgaataatgatattccaatttccacacataagtgaaagctgggtctgggatttgaagttgagacttaaattttggttctttgaactcctagcctctgcaatggtaacactcagtcaagaacattctccactccattcttctctgctctcccagtaaaatacccagagcagggtcatcacagagggaagaccaggactcttgggatctcacagagatacttgaccccatgctcatagcagcattattcacaatagccaaggtatagtagaaagagcctaaatcccatctgtgatgcatggataaaaagaatgtggtatacacttacagtggagtattattcaacctccaaaaaggaagataattctgtaatctgtgacaacatggatggagctggaggacattatgttaagtgaaatcagccaggcacagaaagacaaatatcacgtgatctcacttatacatggaatccaaaatagtgaaactgtaaaagtcaagggtgtaatggtggtttccaggggctgcggggggaagcagaggtgttgatcaaaggtggaaagtttcagccaggcgagaggagtaggttctggagactgtggtgcaggatagtgccaacagctaatgatgcagtattgcattcctaagattctctaagagggtagagcttatatgacgcgttcttataataataataataggggtgagaagaaacttcgagaggtctagacatttaattatgtatagctttatacatattaattttacctcaataaagtgatttttgaaaaagaaaagaaaatcctccttgtggaaatttacagaggatgattccagaaagatactatatcatagactatcaatcatttggcttatctctcaagctcttataaacagtaggaatattaatggactttattaacctataggtcaatgaattttaatttatttaattatctttaaattttccttgacaggaggagaaaataagtagggcttattgaacaataaagaacatttattttatatcaaagtataggtccctatgcagcctttattttatctttaatattcagaagtgaatccacaatggctttccttcttacttatatggcaaccaaaactgtatgacatggcaaaatatcacaaaacagaagctagaagttgaagctgtaataaaaactaccagaatatgtgaataatctgattttttaaatggaatgacagcacctatggtgtggcttttcttgctaaacagagacacatttttatccctacaaatggtgtcatgtattttttttcagtcagttgtgtcatattctggcttcatacttttttccatgctcatttaaggccatggagttgtctaatacctgttaagatcttggatagttttgaccaccaggaggcgtgttagaccagcaaattgacacttcgtcactagcgtccatccttgaacacttcggaagattaaaggttaaagatgaacgtgagcctcactgaaagtgattgtagagagataaagagaaggattataattttcaaaagaaactctgagggtttttttgttttgttttgcttttcaattcagctcaaaccaaatggttgctttttttccgtttttgtaaacttgcgtcatgtacctgtgaatttcgggcaggggctgaggtgtggggagctctgctgaaactttaaagcagagtcgtgattctctgcccccctccattacaaaaggcaggcaataatgtaaatagaacgttagacaggctgtggtttgtgctcagctgctcagggtttgcaggactgctgcttccaggaatctagctttctccaggctcagcctcaattcaagtaaggctggactggcaggactaaatagaaacttacccacttttgttacctcttttctgagtccagcagggaggcaatcttagatcgtagaaattactgccctacagaaatgccgatgtccagagagaaagtggcatgtctagtgctgttaatttcactactgctttgtgttatcgctttaataagatagggacttatcccagcgggggctgggagtaatgccattattaaatgattttctcttggctccaaacccacctttctatatcctgccttgtgatgccagcactgggactctgcaaactgcagttgggcttggccagatgctcctggcaaggggacgctagagtgaggccgcaaatctggagggagaggggcccgaccgttcctcctgaggacttcctcctcctcccagcatctctccagcaaggccgcttccacccagcagtggcagttccttcccactgttgcagctgaatcatgtttgtagttttccaaaactcacaaaaccagccctatcatgccctcttagagacttcagcttacccttgcataactccaagtccaaagcctgtgcaaaacagttcagctgacttggaagggagattggcagtttcttacaaaagtaatcatattgttaccctgtgaagcagcaggcaggctctttgatatttgcccagataagttgaaaacttgtgtctctacaaaaaaactacatgagaatgtttatgccaactttattcataattgccaaaatttggatacaaccaagatgtccttcaacagcgagtggataaacagactgtagtacatccagacgatggaatattattcagtaataaaaagaaaaagctaaccagccacagaaaaagacatagaggaaccttaaacgcatattgataaagaaagaagtcaatctgaaaaggctgcatactgtatgatttcaacgatatgacattctggaaaagccaaatctatggagaagtaaaaagagtagtgtttgtcagaggttcagctggggtggggttgttggggatgagtagagggagggatgaataggtacaggagagacaattttttaatttttatttttttaagacggggtcttattctgtcacccaagctgaagcatgatcatagctcactgcagccttgaactatgggactcaagggatctcccattgcagcctccagaatagctgagaccacaggcacacaccaccacacaagcttagcacaggagatttttagggcagttaaaagtattctgtatggtaccctatggtggatgcatgtcattatgcatttgtcaaaacccataggatgtacccaagagtgaaccctaatgtgaactctggacttaactatggactttaatgaataataacataacaatattggctcatcaattataacaaatgtaccacatcattgcaagatggtaataataaggggagtgggggggtgcaggagcatatgggaacttgataccatctactcaattttccaaaaacctaaaactgctctaaaaatagtctattaattaattatttaagaactcaaagaaacaaaagccttggcagtgttttttacattgatcagttatgtgccccaccatggctggtccaggcctgagtctctcttgctccactcttagcatctcctgtgtgtatttcgtcaaacccatgtcaactgtgtgggccactctctgaactcctccctctccatgagctcccaggattttctagttccctggagtccctttttaggtcttctggcaacaaagctggaattttagttacttggttctgtgtgtacttcagcaactgcatctgcatcgagtgccgagggataaaagtaacagacaaaaaaaaaaaatcaccagcagtttcagcactttaagttccagtcctcttctatgagtcacttttcagagtcctcacagctgccctgtgccttatgttcaggttttatagcgacatccgctgagcaagatgagtggcatgtgcttatcccattatacgtgggaccaggacttcttattatttagatattcacatgaccagtgccaaatggatatatcggctataacataaagtgacctgcacctctcaaaaatgccaaggtcaaatcagacaaaaactactgaggagttgtccaaaattaaagcagaccgaagagacggagcatagctctaaagtatatcactggagaaactggcaacatttaaatacagtctgtggattgaaagtattgtatccaagttaaatgtgccgatttgggtaactgttatggttatggaaagggatatcctgttctttggaaatagacaccaaaatatatattaggcagaggggatgctatctttagctcactttcaaatggttcaaaatgcacatacacatacactctctctcacatacatatgcatgcacacgcgcacacacacacacacctgcacatgcatgcaagctgaggggtgtagaagaaggaacaatcctaaagggactgctattcctaacctgaccctgtcctaggccaccagcacacagcacccaaccagcattcaaccttccgactggacatggacaccctctagttgcctcaatggctcagggcacatgcggagggctggctgggcccagctgacaagaattcatatatttggtgaacttccttagagtgaaatagacaggctcacaagcttgttccgtgagatacacacacacacacacacacacacacacacactccccactcaatgagtcgttagaatggagaagcacatgtttaaaatccataaaacaagacatagaacaacagagtagcttgatggtgaactcggcatctttgtggctgtgttcatgtggcattcattcattcattcattcattcgataaatgtttactgagctaccacttgcaaggaagtgctgacaatagtcctgtaaaaaagacactttctctgcactccttaaaatgacaatcttttggtggagaattattagcagggtttattgggccccacctggggaactcaggtagaaataagaggacagttttgcagagggctgcaagtctcccagtgctgcacagaggaaaaagcttgagaacttcagttgaatattgtcaggctaacaccacgcttgtccctggagacctgggaccacaagacagaaagaaggctattaggtcttagggactctaccctgctaaggagtttggacgttttgtttttggtgttttgttttgttttgttttgttttgttttgttttgttttgacagagtctttctctgttgcccaggctagagtgcagtggcacgatctcggctcactgcaaagtctgcctcccaggttcaagcaattctcctgcctcagcctcctgagcggctgggattacaggcgtccgccaccgtgcccgactaatttttgtattttttagtagagacggagtttcaccatcttggccaggctggtctcgaattcctgacctcctgatccacccacctcggcttctcaaagtgctagaattacaggcgtgagccaccgctctcggccggagtttggacttttgataggacacccgatgcaattgattgatgtgtgtgtgtgtgtgtgtgtgtgtgtgtgtgtgtgtgtgtgtgagatccattgaatgtggacgctcaaggcctggacagagtaggaagtgcacagaaggctgagcaggcaggcacgtgggtgggactcaggcccacctctggccccagaaggggatgccaggcggtggggaccagcttagacaggcaaaggggactgtgggaaggtgtgggaagctgtcccaggctgcagacccaccagggtaccctgaaggctggccctggagaaggtatttaagccaagaggtgagtgcccaagccggagcctggcccaggggacacggttgggcctgtttcggggcacccggaacctagggactggcatggccgggacctcccggagctgctgctggaactcaaggcgcctcttccggttggacttcagcggctactggaggcaggcgtggagggggtcgttctcctgccggtggtccagacagaagttgacctggtccaggatgtgatggcagcatattctgcttcccggaagccgtcgcccttgccttggtctcccgctgtccccgcacgcccacgttccgcatgggacctgactcaggcaccaggagggccccgcgacgaaggagcgcggcgaccttcgctctgaaagcgggagccgggtgggggcattgggggtggtcagggaggatcgcagatgcgttttagacaataagacaacagacagtggcgattcccaaccctggctgcacaatagaatgagggccttttggggtctcaaactgatctaagagtaaagtctaataatttttaaaaatcaccctaggccagtggttctgaaaatatggtccagagaccctcgaggccctaaggatccttttcagaggtccataaattcaaaactattttcctaatactgtgctcctgagaaatgacttgctttattcactagtgtactcgggatttccagaggcgagggcacatgggatgttccagcagatcaaaagcagaggcagacacgaaattccaggtgtcttgttaagccagtctttaaatagaaggcaagcaggtgaaattctttccgcccagcttctgttttggaaaagtatagtatgtttcataaaactgttcatttatgttacataagtattattttatttatttatttatttatttatttatttgagatggagtctctctctgtcgcccaggctggagtgcagtggtgcgatcttggctcactgcaacctctgcctgggttcaagtgattctcttgtgtcagccttccgagtaactgggattacaggcaagccccaccacgctccgctaatttttgtatttttggtagacacggggtttcaccatgttggccaggctggtctcgaactcttgacctcaagtaatccgctggcctctgactcccaatgtgctgggattacaggcttaagtcaaggcactgggccgattaatgcataagcatttttaaatctcagttatattttctaatacattaactatcagtagataagcccacacaaaccaaatctctttacattgtcaataattttaaaagtataaggggatcctgagaccccaaagtttgagaacctctgtctagacattaatactaaaagataaagagtagccttaagagttacctaacaagggattcaaggagggttttttaaattattcatttacagaagctggggccaggatggaccctgaatgtacaagtaggtcagatccacaaaggccacatttgcagctgcctggtctccccttcgtccttcctcatcaattcccatccaccagaagcttggatttggcataaaatattgatcccctaattctgaatctcatcctacagaccttgtttcttgcacaagctgagttcaccataaatacagagcaggggagttcctttgaaagtggcagattgttaagaactgctttggaaagctgatcataactcttgcctcttgttacctagattaactttcctgcatggtttgcgggttctctatggctatttctctctttcttacagtttaataaaggattgggttgagccatataaaatgatcatttttgcaggaaaaaaataactggatatcggcaattttatatgatgtaacctaatacattgcatggcattgtcacattgtattttatttaacccaggcaagaaatgtgctttgcacccttgagtatatgcaagaacagctaccaaaaacagttattctgaaaatggcaagatgtcttaaaaaggatagaagcccttgcttcttggccttattcagggaccttgctgctggtgtgtagttgaacatgagagcaaagcagggtctactgattccaaagtctgtgctgtcagaccatggtggctagacattgaagtaaccagcaatttattaactagcacatctctgtactccattgtgatgctaacctccatttctcatgtgaatcattgcaggattcttagagtatattctcaggtctaggaaaacttagattacaccctttatgactcctgtaaacaatgtattatattgcgagttggtaatatgtactatttaactcaaagtttttgtcatctgaaaaatgcaggtaataataatatctacctaaatgtgtgcaataatttaaaggaagttcttggtttatactaggcgtggccttggggctcagtaaatactattttctccctttcaccaccaaaaatgcatatacactcatgtgtatgtacaaattcacgcaacacacactctcatgcaagaacacccttgcacatacaaggatactcgctcatacatacatgctcacacagtgctagtatgcatgaacactagtatatgctgggggcaaacacgaatgatagtggtaacctcttatcccactgtgtctccatgaaagctttaaagggaccactgtggaacagaaggagcataaatccagaactcggaagcatcttcttattcttctcctttgttctttggtgcattatgtttgttgtaaaatccctaggcctctcaaccaggttttctcatctgcaagatgaaggcatggaagatgatagcagcttcctgcaatttgaaagtcattttttgacaaatgtgatcaacatcttttgtgtctggaggcacaagttcagaccccaactacatcccatgggagttcactgatttgaagcactgcttcctcctctcttacagtaagtatgggcagcccgataggtctttgtgataattaaatgaaatataagaacacccctacccactctgtgaggatctgtgatctcagctatgtccagcaggacagatgacacccggtccttcatgtgacaagatcctatttctcccacacttctctctcccagagtcccaggcagagccccactcccatgccttgacagtgaagcagaaaattttcctgcctcctttgaatgaacttaacactatgttcacacatcatataaggaaaaaaaaaggaaagaaacccctcacacccactctggtacaccttggtgtttgccattattagaacagcaaacgaaatactattgattcagagggtttgtggtttaccgacctagtgcagttaagttcctcttcctacccccatgactcatgaatacacatcaaatcctaaatagtttatttaccgtttgaacagttttttgcttcttgtcctatttccctctggacagacaacccaaaacgctttctttacccacagaaacaaatttaaaaacaagaaatacagttctaggaataaagaaagatgtaagaacgttaattttatgacaaaagaaacctcattagagagtcttataggaaaaaatatctgagttccaatttatatcccgccataataaaacctgttttactccaaaattgtcctggattggatgagaaacaatagagtaacctcactgagaagcagagcactcagcttgggtgagtgggggccaaggcaggagcgagcaggagctagtgcagacgtctgctttctggatgcgggaaccaaggggcttgcccgttaacccttcctaattcacataccctttaaaaccttactgcttgaggcatggtcctggaccgagggtcacctggaagcttattggaaaagcaaactcacagaccccagacctggtaaaccagcaatctgcattttaacagaggcccaagtgatctgaatagacactcacgtctgagagcagtgccttgaaaagctttgccagaatgctgtgaagcataagccgtatgacttgatctgtggtccgttagaattcacaggataacttttccaaagtcttaaattagaggatttcagaattaaaaggaccttccctcaacctctttaatgcatgagttccctgagagtggccccactggaagactctggtgtcacatcagaggagtttgtcctctgggaagagtttttcaacagtgcttccgtggggcgagaaggaacatgcttcctcttaatttccactcgcctgtacattatacacattacagagccactcagagaaaagattaagcttctttctctgcaaaggatttttggaacactgaaacgacctgcatgcctgatcctatatccaatttcttcccaaagagctctagtaggttcagaatcacacccttaaggaagagtatccacagagtggccctggacctacctctctgctggagaggccacatgaaactgtatcaatatgcaaagatgctggtcctttcacacttttctgatgaactcgggtgttattaaaattatgggtatttgcttatttcccaggcagtcccatggagagctgaggctggctagacactgggactgactgttgttatctatgcctgttgtccacgtgacagccagggctaaagacaagactttctgtctctatcaacagccagagtaaatcctcatgaaacaatattcggtactagagataccagctgcagcagaaaatatacagatcataggcactgaactccaacaagacacaatctagtccagagataggccgcaggagtgcaaatatcagtttatcacttaaacttgtttgatgttcttggcagtagttctaagcactgaggaagtaagtctaaatggtcttcaggcagccaagttaaagagtatcctcaataatccaataatctaataataataaccacctagtgcatccttcctctgtgcctgattcattcatggcattttatgttatcttttgtgagtatatgactaacttcactgtgcagatgaggcagctgaacctcagagaggctgttagttgcctaagtttatgcagccagtaagtcactttgtagattcaaatgcttctataccactataacatttataatagctatgatattaactagtcctgaagaggttaacttatgttcaatatgatctaattgaaatggcagagaagtatgtagaatattttagaagtatttccactagaatagtaaaaataatttactctttagtgttttctggcaatgcaatgtaatgaagattttttgtaggcaactgggagcaagagtgactttaaattctggctccaccaattactagctttgtaaacttgagcaaattacctaaccccctgcacctcagtctggcatctacagagtggacttaataatccaactttggagtgccatggaggcactgatgataaactgtgtttggagcataaaacacctagaaatgcatctagcacagggcaagatggaaaattaaattcgtgagatagtgattaaagaatgtgttaatctggaaagattctaaggcatagatatgctaaaaatatattcatattctgggcaagaaaatacagccagtgtggagcacggggttggggactgtaggtttctcatactacttccatcactgcagagtcatcaataagttgaatttgaaggctggggtagaatcagtaatcattttgggaaaggcaggaggctccgtgtttagaatatcatgaaccaaagctccaggatgaataagaaaaaagagctgaaaagaacagtaaatgaatgtggaaaacttagtgtgagaatgagaacatggtatacgcagggaatgggaggttggcttttcggctacacaacatgggtcggcagatgttttctgtaaagggccaaagaggaaattgttaggttctgtgggtcatactgtctgtgtcccaaccgctcaactctgctgttgtagcagaaaggtagcaatagacaatctataactgaatacatggatgtgttccagtgaaactttagttacaccaggggccacaatttttccacctctgctatagctgatagatttaaaaactaacttggaatgtcaccatgaagaaattctctaaatacaaaggatcccaagaaagctattaagaccctgaaatccagtcccaaaaaatttataggaagagataattatttttggcataaaaaatacatctgtcttactatcttcgaaatgactctgagaaaaatatattgagcagggaagtgttttttttttttattccatgtctgaaaatatacctcaaacagaaaattcagatgtgttaaaatgctatttcatccaaacagaggcagcagtttggagaaataaaaagactctggagccagaagctgctgctgaacagagaggtttatgtttcaagggagtggaaatcaggctgtaccctgagtgttggcttgggctggcaacggattgcccactcactaggagctgggcttcccaaggaagggacaagcacaaggaaaccttcttttcctctgcagagaaggaagctgggcacctaagcggtttcatgattccatgactggctcattgagaatttattggatggatttcactcataaagtttcttttatggaattctaagggatttgctggaagagatttctatgtgaaggtcaaaaggagtaaattatttagcttccagaagaggcagtggttactattcacagactgaacagcgacagggagaacttttttctgtaaactccatgaggggagggataaagactccgttgctcacccttgcctctccatcctatggttcagagccatgaagagcagacactgctgaatatgggggagctgtttttcaccattcagcgatatttctgcctctttgcatagccagtgaaatggctgggctgttgactgaaaggatggatgaacattgcaaatcttatcatttctattccttgtatcctcagaaaagaagtgttgtccaatgacgaatgcttggtcttagagtctggccagaacacagaggaagaggccgctcggaggacagagtgagctgcccaggtggcccactggcatcaggggctgttctgtatgaagctgtttgaaaacttttcacaaggtcctgctccttcagaagagggtgcatatgatcttatctgcccataaatctcagaagttttacaggcaaaatctatagtaggtggttaactctacacattgccctgcccactcacagggataaatagaaagtcctgtatccaagtcggggaaaatactaagcttcaatccggaagtttagggctagttcttttaactaagttgttctttgttcttcaaaatctacaatctatttttaactgaagttaaaatatattttaggtattcaagattagaaggtatctaaactttgagcttttgatttccatttaactgtttgctttccacaaacatgtgatgacatgattatgctgtagaatccagctatttcttagttcttctctaaaatgctataaatttgtgtttcttcactgaattgtccccattttgtattagacgtgtattctatgagagaaaaattcataaaggcaaatatttgccattttcttttttataatactttttctatatcatttatttttttattcttttagctaaaggaagtaaacaccgtttcattttatatctacaattatcttatttttcaaatagaatataaggatttttaaaaatactactgaatctgattagtaactgtataacgtattttctgtatattttgactgtgagtcaatttgaaagcagcaatttaaaacccacttgaatgcttagtttagcctaaacaacgactacaacataagaacaattctacaatcaaattagtagtcaaataaccaacggcaagtggaaaattggtcatcgtgttattcttctataacctaattcaaaatgcaacatttaaaaatgtaaatctctcttttcaatgttaaagaagcatcgatgaatatttctatgagtaggaaaatatttattaaaatagtggccacatattgggactgatcttagtcttttaaccgtcaactcttggaagagacatctgggccggttggagcccaggggcaatggaaaatagaatgcgaaataccagccatctgtgattggcccttacaaagaggaggaaacatagtcccaatgccatccacttacagacctagagaagaaagtcattgatcaagtatttcattggagaaaagttgtcacaaatatgttgattaatggagactaatttatttgatatggaagtttgtttttccccccttttttgatgatgttcgtcttgatgaagttctagctgttcatttttaatgagaaatggttaaaagttaaactaacttgtcttacgtctcctcacattttttttctgtctaccttcacttcttcaattctatgcagtcttaactgagccaatttgtacatattttccatggtgatatcaaatccacagaagaattaataactatggaattttagaagccttgcaaaatagagcaagtgagctgagggtgacctctggaacttccatgtaaggcttaacttgggctcatggcctggaatgaaccagctcataatgtgacacttttataacctaataaacatgactcctaggaacaagttccaatcacatcaaacaaaaagctgtatatggggtttcggaagtcctactttctgatcccacaactatcatatctaaatttttaaactggacgagtcactcgatctccatgaggcaaatctcccttccctgttacatgagagtttaactcacagcacctaggtcacctctagcacaaaaatattatgatcctaaaccttattcctaattgagatctggatggagggtgttccaaatccaccaaattcaggaaattatgtgaatttctttgtaaaacagtgaagtctgcctgattaactatgattctcattcatttccaccattacctactttgatagctaaatttgtttgtaccttgagaagtctttttccacctaaagttctttctcttggagggctagagagaaagtgaggtccagttctctgggagttaaattccgtttacgaaacagcaatctctctaggagtcatacttctcaggactattccattttctcaaagcacgtatgcacaatttgaaaatgtctgaagtcacagtttcgatggttgtttccacaaggagagctatggcctatgaaataaatgtctgagtcagattggaagagaaaatggagaatgatgattgacaaatatactgattttggaataacacttattctctgccttcatgtccaggtcaatattagaataataataatacttttcttcataattttggaggtattaaatgtgcaatgtacgtgaagacttaaaaaagtaaggtgacaagaattcctagttgttataatgtagtcatccctcagctcaggtcctgggctacagtttttgcttagacacttttggtgactataggaagctgcaagttctttgtggtatatttgcagaatatatttacaacttttgaaactggaattacttcatgatatccatcagtagacaaccttgtgaagtagataagacagctattataatttctgtttaacaagtcaaatttctatttaaccagttaaatttccatttcacaatggagattcaaaggggttaagtgacttgcctaaagtcacagatctggtggcagtaggaccagaggtagattctagaattatgcttctcattaaacctcttctctctcattttttgtatttcttcgcaagggcttcaaacatcatttcgtgagtgtttgaagattgacctagggtcttcatgattactcatcagaggcccctgctgatctttttactgaagtttatataagagagaaattttaaaatcatttcttatttacttttaaatatattagcagtgaccctgtgctatccagatgagtataggtggttttcatcttcatcttgggttggttgctgaacatgcacgtgcccagatctggaggcacactgcagcatggctggttagctttcacaaggcttcagctcaaagttcatgctccagctaagggagccttggttctctcagttggcgctaaaattttgcttcccaaatttgaatgtgcagatgaatcatctggagatcttgtaaattatgactcagcatgtctgggatgaggtctgcaattctgtatttctaacaagtcccaggtgacatggatgtcataggtctgaagaccaaattttgagtttcatgttagatatgtcattaatcatagggatatcacaattagtgtttctctgataaaataaatggtgttcaataaacatctagcattgcttgactggggtacaagaatctggcagggcttagagctgaattctcttcccaatagacatgagacctcatattctagggagctctgtgttcagctacatagtatagaattccagcaccacacagaatatgtggaaggaagcagaggtctccttagtgagatatacatattattattgataatataataataataatagcttcattttcttgagaacttgccaagtgctaagaacatattaactcacttcattcagcagctgagacacagaaagtctcagtaccatgttatgtgtgacaaccagcatgaaagaataacaaatatatatatatattggtctctttccccagttcctgacacaaggctccaaaacccttataatttcccaggcaacaggagtgctagaagcatcttttgtattagtatttggtctttagcctgattcctgacacagagctcctaaatcccttagaacttcctgcatgcatgataggagcatctttttttctaatgagttgactcttggtggacttccagatgggggctggtcaccagacagactacaccatgcttagaagctttgaagtttcagcttcatttcccattctccatgaaggggagaggagttaaagattgagttaataatcatacttatgtgatgaagcctccataaaaatccctgtaagactggatccatgtaccagtagggtggcataccccaactccacagtgacagaaactcttgtacttgagaccctttggaccttgccttatgtacctttttatctggttattcatctgtatcctttatcagatcctttactttattacgtaataaaccagtaagggtaagtgtttccctgagttctgtgagccattctagcaaatgattgaacatgagaattgggttgtggaagcctctgatttgtagctcagtcagacagaagttgtgagtaacctgaaaacccaccacttgtgattggcaggcagtcttgtgggcctgagcccttaaactgtggagtctgtgctaactccaggtagttaatgtcagaagttatagtgctgaaagataaaagtgtcaaccaagaattctatacctggaaaaactgtcctccaaaaatgagagggggattaagatagcccaaattaacaaaagctgagggagtttgctacgactagacccattgcacaacaaatgctaaagagagtctttcaggttgaaatgaaaaaacagtaggtagtaacagaaaagcatatgaaaatataaatatctccactaaagtaaatacatggacaaatataataaccagtattatcgtaatgttgtttataaccccatgctttatttcctgcaagatttaaaagacaaatgaaccagaataattataaatgtatgttaatgggcagccaatatataaagatgtaatttatgacattcataacataaattaatgttgttaattgatctgtgaatgggtacagttttttttaattcaattgaaattaagtaggcataaatttaacacagattattataactttaagatgttaagtgtaatccatattatgactacaaggaaaatatctataaaatatagacaaaaagaaatgaagagaaaatcaaaacatgccaccacagaaaaataacaaagaaactggatttaaacttgacatttgaacaactggacataatagacacctacaaaacacccgacaatcacagaatatacatttttctcatctatacatggaacatatttgaaaaccaactacatgttttgtcaaaaaacaagtctcagtaaattttaaaaaatgaaataataccaaacatgctcttggatgacattgaaataaaaacagaaatcaatataagatctgtcaaaactacataatacctggaaattaaacaacttgaggatcttttgtatttctgtatattgctcctgagtaactcctgggtgaacattaaattaaggcagaaatcaaaattaatgttgaaattaacaaaaatagaaacacaacttaccaaaatctctgggtagcagcttacacagtattaaaggtaagtttatagtcctaaagaccttcatcaagaagttagaaaaatcttaaattaatatctgactttgcacctaaaggaactagaaaaaaaaatccaactcccaagctggcaaaagaaaagacataactaaaattagagaagaactgaacaaattgagatgcaaaaattaatataatacaaaagattactgaaaccaagagttggtttttcaaaaaaataaacaagattgatagaccactagtaagaataacaaagaaaaaaagagagaagacctaagtagtacattcagaaatgacgaaaatgactttacaattgatcccacagaaatacaaaagatcctcggataatgctatgaataactctatgcacacaaattagaacatctagaagaaatagataaattcctggaaacagaaaatctcccaagattgaatcaggaagagatagaaaccccaaatagaccaatatcaaactatgaaattaaaccaataataaaaacctaccaaccaaaatagaaggaccagatgtattcacagccaaattctaccagacatataaaggagaactagtaccaatgctactgaaactattcccaaaaattaacgaggagagactcctccctaactcattctatgaagccagaatcagcctgataccaaaatctggcagagacacacaaaaaaaggaaacttcaggctaatatccctgatgaacagagacacaaaaatccttaacaaaatactaacacattgaatccagcaatgtgcaaatagccaaatagtcttaggttgaagcaaaagtaattgcagtttttgccacaaaaccgcaaatacttttgcatcaacctaataaatacaccataattaagtaggctttattccttagattcaaggctgattcaatctatgcaaatcaataagtgtgattcgccatataaaccatacaaacagaatttaaaacaaaattcatatgatcaccttaatagacacagaaaaaggttttgataaaatccaacatcacttcatgataaaaaccctcagcagactaggcattgaacacacgtacctcaaaataatgagagccatctatgacagacccatagccaacatcacactgaatggacaaaagctggaagcatcccccttgagaactgcaacaaggcaagacgcccagtctcaccgcttctattcaacatattactggaagtcctagccagaacgatcagacaaaataaaaatataaaaggcatccaaataggaaaagaggaaatcaaattatctctctttgccaataatataattctatacttagaaaaccctaaactttccaccaaaaggctaccagaactaatcaatgattttagcaaggtttcaggatacaaactcagtatacaaaaatcggtaacatttctatacaccaataatgtgcaggctgaaagtgaaatcaaaaacacaaacccatgtataatagccagaaagaaaataaaatacataggcatacagctaaccaaagaggtgaaagacctctacaaagagaactacaaaacatcgctgagagaaatcagagacaacacaaataaatgaaaaaaaatccatgctcatggattggaagaatcaatatcattaaaattaccatgctgcccaaagcgatttatatattcaatgctgttgctatcaaacaaccaacatcatttttcaaagaaaactattctaaaattcatatggagatgaaaaagagcccaaacagccaaagcaatcctaaacaaaaggaacaaagctagggtcatcatactacccaacttcaaactacactataaggctacagtgactaaaacagcatgatactggtccaaaaattaaaaaaaaaaaaaaaaacagacacatagaccaatggaatagaatagaaaactctcaggaaaaaaagttgcacatctgtaagcatctgatcttcaacagagccaacaaaaacaagcaatggggaaaggacatcctaattaataaatggtgctgggatggctggctagccacatgcagaagagtgaaattggacccttaccttttgccatatacaataatcaacctgagttgaattaaatatttaaatataagaattcaagctataaaaattctataagaaaacctaggaaatacctttgtcaacactggccttggcaaagaattcttgactatgtcaccaaaagcagttgcaacaaaaacaaaaattgacaagtgagacctaattaaactagagagcttctgcacagcaaaagaaactatcaatagactaaacagataacctacagaatgggagaagtatttacaaactaatatctgtcaaaggtctaatatccagtatctataagaaacttaaatcaacaagcaaaacacaaacaaccccgctcaaatatgagcaaagatatctgggcatggtggctcgcgcctgtaatcccagcactttgggaggccgatttgggcagatcacaaggtctggagttggagaccagcctggccaacatggtgaaacttcgtctctactaaaaataaaaaattagctgagtgtggtggcaggcacctgtaatcctggctactcaggaggctgagagaggagaatcacttgaacccgggaggtggaggttgcagtgagccaagatcgtgccattgcactccagcctaagcgacaagagcaagattccgtcaaaaaaaaaaaaaaaaaaagcaaagactatgaacagacacttctcaaaagaagacatacaagcagctaacaaacatgtgaaaatatgctcattatcactaatcattagagaaattgaagtcaaaaccacaataagataccatctcacactagtcagaatggctattattaaaatgtccaaaaacaacagatgctgatgaggctatggagaaaagggatcagttacctaatgttggtgtaaatataaattagttctgccactgcagaaaacagtttggagatttctcaaataacttaaatagcttccatacgacccagcaattccattctataaatgttcccatttctagaacaattctataaattgttctatcataaagacacatgcacacatatgtccatcacagcactattcacagaagtgaagacatggaatcaatatgcatgcctgttgacaatagactggataaggaaaagatggtacatatatatcactgaacactacacagtcacaaaaaaaagaatgaaatcgtgccctttgctgcaacatggatgctgctggagatcataattctaagtgaattaatgcaggaaaagaaaaacaaatactacatattatcacttataaatggcagctaaatattgagcacacatggacataaacacgggaacaataggcattgcagactactagatgggagagggaggaagagaggtataggttgaaaaaatacctattgggtactatgttcactatctgggtgcattatactcatgtaaacaccctgtacatgtaccccttgtatctagaataaaagtttaaatttaaaggaaacaacatgccaccatacatgcacacacacacacaaaaaactaaacacaaaagaaggcagtaataaaggaaatgagagagaaggcatatagaaaaaataataaaattacaaaaaaagtacatgtaggcatataaagtaattattaataggtatgtacttattttttgtaatttggcatatatattatatttgtaggcatataaagtaattattaataggcagaatggatgttttaaaatgggattcaattatatgatgcttacaagaaactcacctttagatagaacacactggttgaaaatgaaaagatgaaataagatatttcatgcatataataatcaaaatctaacaagattgacttatactaatattagacaaaataaacttcatgtcaaaaactgtaatgaggcaaataaagaggtcatatagtaataaaagggccaattcttcaaaaagttataaccattgtaaacatatatataccaaacaccagtgctctaacatatctaaagcaaacacaattcgaagtataagtggaaacctctacaataacagtaggaaactttaataccctattataagtaattgagagaaaaaacaaatagaagattaataaagaaacagaggacataaacaacacaatagattaattggatctaacagatacgtataaagcagtccacccaacaacagcagtatacaatttttttctccaatgcacatcaaatattcacatgataggctatttgttaggtcacaaaacaagtcttaacaaattttaaaagattaaaattatacaaagtatcttaacaaattttaaaagactaaaattatacaaagtatcttttccgatcccagtggtataaaattagaaatcaataacaggaggaaaactcacaaatatatggaaattaaacaatacactcttaaataaccaatggttcaaagaagacgtcacaagggaaattaggaactatcttttctaataaaaattaaattggaaacacaacagcaaatttgtagctgtaaatacttatgttaaaaaagaaaaagatctccaatcaacaacctaactttacaccctacctaattataacaaaagaatgaattaagcctagctataagagggaagaaaataataaagagtataacagagataaaatatagaagagaaaaatgatagaaaaaataataaaacaaagatattaaaaatatcgaccaaattgacaaacctttagctaaattgtgtaagaaaaaaggagaaaagattcaaataactaaaatcagaaatgaaaatgggcacattactaattattttagagaaataaaaagaatttcaagaaagtagtaagaaaaattgtatactaacaaatttaataaccatctcataataaacaaatttctagaaacaacaacctattaagactgtatcatgaagaaatagaaaacctacataaacctttaactagtaagaggattggatcagtaatcaaaaacttcccgcaaaagaaaagtcctggacaagattacttctatctggtaaatgttatcaaacatttaaagatttaacaccaatcctcagagaacactctctatcccattctatgagactggtattacctggcaccaaatctagacaaggacactaaagaaaagaaaaccacaagccaatatcccttataaacactggtgcaaggctgggcgcagtgctcctgcctgtaatccaagcactttgggaggccgaggtgggcagatcctgaggtcaggaattcgagaccagcctggccaatatggtgaaaaccctgtctctactaaaaatacaaaaattagcctggcgtggtggcaggcgcctgtaatcccagctactcaggaggctgaggcaggagaatcacttgaacctggggggtggaggttgcagtgagccaagatcatgccattgcactccagcctgggcaatagagtgagactccatctcaaaaaacaaacaaacaaacaaaaaactgatgcaaaatttctccataaaatattaccaaactaaattcaacagcttatcaagaagataatacaccatgaccaagtgggatttattcctggaatgcaacagttttacaacacatggaaatcagtcaagtaatacaccactttgatggaatggaagaaaaaaacacatgatcatctcaatgcagaaaaattatttgataaaattcaacacccattcatgataaaaagcacttaacaaactagggatgaaatgaaagtaccttaacgtaataaagttcctgtatgtaaaacccacaattgacatcatactcaatggtgaaacgctggaagttgttcaagatcaagaacaggacaaagatatccatttttgctgcttctattctacatatatattgaaaattatagccagagcaattaggatagaaaaagaaattaaagtcatccaaaacagagaggaacaaataaaattatctctgttcacggatgacttgatattatatgtagaaaaccctaatgattccataaataaataaataaatacctggtagaactaataaccaaacttagcaaattaggagtgcacaaaatcaacatacaaaaataaattatgtttctatatactaacagtgaataatatgaacacaaaattaagaaaacaattccatctacaataacatcaaaatggataaaatacttagaaataaacaaaactaagaagacgaaagacttgtacactgaaaaatacaaaatgttcctggaaattaagaaattaaggaagacacaaataaatggaagacatcccatgttcatggattagaagatgtaatattgttaaaatgtcaatattatttaaagtaatttaaataatgtcatgtctttcaaatttccaacactgctttttgcacaggttaaaaaaaattcaccctaaaacccatatgaaatctcaaggactcccaagtagccacaacaattttgaaaaagcagaagagggctcacacttcctgattaatacaaagctaaggtaattaaaataggctgtgttgacaaaaagacaagacatatagactaatagaatagaataaagatctcaaaaataaatctttgcatatatggtctttaaataagggtgtcaaggctatgtaatagaaaaaaaataggcttttcaaaaggtggtattgaaaaaactggatatctatgtgcaaaaaaattaactgggacccttaccatatacaaaaattcacttaagatgggtgaaaaacctaaatggtttttggtaagtaagaccaaaacttttaacaaaaaatgtaggagaaatttttcatgacatgggatttggcagtggttatttagatacaacaccaaaagcatcagtaacaaaattaaaaatagataaattggattgacttaaaattagaaacttttgtgcatgaaaagacgccatcaacagagtgaaaaggcaattataaaataatgcaaaatgcttgcaagttgtatacctgataaaaaattaatatccagaatatataaagaattcctacaactcaacaatatcaacaaaacaaacaaattaaaaaattggcaaagaacttgagtagatatttccaaagaagatatacagatggccaacaagcagttgaaaagatgttcaacattgcttatcattaggaaaatgcaaatcaaaattatgagatttcatttcctgatttcaagcttagtacaaaactacagtaaaagaaaacagtgctacattgacataaagacagacatgtagactaatgaaatagagtacagactttagaaataaatccttgtatatatggtctttcaatatggtatcaagactattcaataggaaaaaatagtcttttcaaaaggtggtattgggaaaactggatatctttgtgcaaaagaataaaattggacccttatcatatacaaaacttcacttaaaatggattgaaaaccatatataagactcaaagctaccaaacttttagaagaaagtgtaaggaaaatttttcatgacattggacttcacattcattagcatggccagcataaaacacacacatgcacacacacatgcacacccacccccacacacacacacagagaaagagaaagggagaaaataacaagtgtcaggaaaaccgtgaataaattagaacccttgaacactgctagtggaaatgtaaaatggtgccaccactgtggaaaacagtataatagttcctgaaaaagttaaacatagaagtactatgcaattcagaaattccacttctgggtacacactcaaatgaattgaaagcaggtacttgaacagatatttgtacaccaatgttaatagcagaattattaacaataaacaaaagatggaagcaacccaaatgtttattgacagatgaatttataaagaaaatatggtatacacatacaatggaatattattcagccttaaaaaggaagaaaattctggcacataccacaacatggatgaaccttgaaaacattacactatgtgaaataaaccagacacgacaggacaaatattgtatggtgctactcatacaaagtacctaaggtagtcaaatatggagatggacaatagaatggtggttgccaggggctgtgaatagaggaaacagggagtgagtttaatgggtgcggaattttagcttgagaagataaaaaaattctggtgatggataatgttgatggttgtacaacaatgtgaatgtgcttaatgccacagagctgtacacttaaaaatagttaaaatgttaagttttagttctgtaccttttacaacaattttaaaaagagaaaaaacttactgtgagtgaaatgcctagtattcacaaattcaacctcccttcccaaggacaaggtaattaaagaaaaattaaaccagtacatcttacgtgtgactcacaagtgaaacagaattctctctccttgtacactcctcttttcactttatttaattcagcttctgatcgtgtccagtgcattgtgaactctttgagcccagtgtggtaaggtgagcatgctgcgggccaagagttgccaccccatcctcccactgcattgaatcccccaagctctgaggattttgttttctcatgtagggtgggtttcatgagagcatgtagcccagtagatattctgccgtatgtctgcagaattaatacctgtggaggcagactataaaccagggcttgcaaactcaagagactttaggtgagtggagatgatgggtggagacctgtaatgtaggcacctgatgtgaagggggaagccttgaagaggtgagattcaatccctgctcatttttcaactaaatgtatataattcactatataattatgtgaaatagtcttattttaaaatgcaggaatttaatttaatttaatttacaaatactgagcaaactaaacgacacctatctgtggattggatatggcccttacgccccagtttgcaatctctgacctatatgaatgtaatttataatatgcagcactaccattttctggagtcctagatatgtggtgagtaattaactaattccttcgtgcaaacaaacagtaggaaatggatttctgcatatttagtatcttccaaatatcaccctgacccgaggctatcaaactaaatggtattttgggaagggccatgtttccttctaagaaaaagatcttagaaaagagccacatggattcctcctcttccaagtcttcttttcattctcttcttgtcattcatgagcttggtggtctactactttctttacatgatgatggaacactggtgacttacgagtcttcctggagcaacagtttccgcctcctgcccttcctcatcctttgaccaatctcattctcttgcccaccatgggctattgcactggcgtcttttgggttaagagccaaggaggtttgtcattatcctttccttattaaaaaaacgggtctttccaaaattacattttgtttaatattctcaagtcaggagtgtgatgttaaaacaatcaggatgagggttgaaaaattacctattgggtacaatgtccaatatttgagtgatgtgtacactagaaacccagcccacaccatcacatatgaaatgcccatgtgacaaacaagcacaggtaccccctgaatctaaagtttttaaaattttttttaaagactcagatactctgtcacggccaactaatttttatacctttgcaaattttaagtaagtttccaggctcctataaattttgtcttttagagaataattttgaggtgaaaaaattaggctaatcacacttagctagaagatgtggaaattctagagagttttgaatgtaccaccttcctgttattttttctatacaacaaacatattacagatgtaaattgaagatgcatatggaaatggaggtttaaattaatatatattatttacttttaccaacttgctcttctttttccctttgcctcctgcctcccctcggtgcccctattgggggtctccttctgtacctatcccttgggcttgtgattagaatgtcattctaatcacaagtgatctcatgtgtgtaaactccagtgatacaaaaatacacaatgtattagatgtatacttgtattactgtgaaataaactagtccctcaagcaattcataaaatcgatgtaatgacctcatactatacagcatgcccatgtttccttgtgaccacatttccatacccatccttgcacatgttatttgtgtgatcttcagagagtgaaggaggttatatttccttggagatagctatatgcaaaacacgctagtacacacttttctgagttgacttgttgtatcttgtttaatgggatctttattttcatcctcagtttgcaaatgaagcaatggtcacagctctttgttccgttggacatgatcttggccccttgatgttgccattacaatggagctagttctaacacacacaggtgtgcatgcgtgcacacacacacacacacaacacacacaaatctaatttgaagaacatggaattccatgctggttttagttttctgggttttgcttgttttttcaggatgtgctaatggggttgctcagactccctgcatggggaggcaaacaatctaggactcctatctccattcaacattttgttgcaaataaaatgctctctagggtttaggctccctggaaatgtgttttctgggaactttaccaaaaacaattcatgttttggaaccaaacctatgaagaataacccttctttggtatgaattcaacaaaaagtctgcccttggcttcattttacagcaggaaacagcctgcttgatattggtttttccaaaggcctcttgccccttcctttgtatacagagggtcatacaggcaggtgcaagcaggggcccagaagagcagacaaaactgacctttcacgttttgttttaggccagtgcgtatggctcccaaaagcatggtgaccaaggcaaacaactttcgacctctgccctcctcacttgtgccttcccattgtgggtgaggcattcgtctcaccccatgacatgtctttttaagacagagagactgtgtattgagttatgatgattattgtgaccttctgttgtgatctgttattttattctacacaatatatatattgagtagatgtcactttaaaacaatatgctatttgttttcatatagtcgttaatgttaccttctcatcttagtttctgtgtctttaccaagttgtgttttacctttatattttgttttgtttcttagaacttagacatgggggtggaggtgggatgagggagatatttagttcctgggacagccagcattgattaatacaaactgcatgctcagcagtgtcataggcactaggagaagggggagagaagggtgtggctgtcacctgtccttaaggattttgcttctatgggagaaaagcctttctcaagtccagatgcttgcattgtgcactgtattaactgattttgctgcagtaacagaaactctaatttcagtgacttccagaaacaaacatgcatttcttgctaatgtgctgtgcctctgctccatgtgccctctgtttccagactcaggctgaaggaacccctcccacggagggaacatcattctcttgacaaggggcagatgcaagagaactggtggcatctcaggattctttctgaaacttctgcctgaacacagcatacatcaggtcttttctccccatcccattgggcaggtatgtgacaagaccatgcccaaaggccaaggggcagcgatgtgtatgccacatccgaggaagccctgctcatctcgtggaatggggctggggcatataaccctcttgtagggaaggggacagtaaaaaagtgaatgaatacaatcaactgcatccacagaattctcctaagtgatgtaatctgcagggaatggtgtggacaagagtgtctacagatggaggcttctgagggcaggtgaaggcaaggagtcaggatggcaggcaaagctgcaagacagagaaagtgtgcaattttcacagggttatgagatttggattttcttaagccaagcacagaatcatggattgagagagaaggaagtccatgtggacatctgtcatttttgggctaccagagtttcccccttctgaatgacatcttctaaatggcacccacttctgaatggcacctcaaattgctctggcaaaatatttcctctccatttctgaaaaagaaacaacttccccaagagaagtgcacaacagtggtctccagaattttcttaatcgcccacttcctcttaccaccacaatgcagctggccaccaacttttgacgaatccgactcctttctagtattttacacattgagtgtgttgcttcccagatgctggtaggagtgatggctacagctcacaccccacatgtggcagcactgtcgcacaaaaggtcctccttccctctaggtctcatggagtttcccttcctggcccccacccttcctctttgactctgaagttgaccagtgatttctacagcaagggactaaagtgggctgcctggtacagggccatagagattagaagaaagttttgattcctcagtattcatttatgcaggagtgatgcttggcattgagaatcagaaaacttttgcttttgtagcaaaacaatgaatgactgaagtgttgagtagcttgtcataggttaattggtgcagaactgcacctggaatacaagtgccccccactctactgcatgggtgggcctgagccggctccaagaataaaggaagtggtgcagaaggctagggcattccagaataatgtggatggttctagacagagtagagatcatgctaaccagaataagaaaattgtattagtggagcataagaaatgacatcagatagagacattcaggcaaaattttgagtgatgtttacaaaataattgtaatagcatagacaataattatgctaaaatgttaaatgaaaaaagacacacatttgctctgatatattttactcgaatagaatgaaaaaattatgtacacaagagcttggagtgacttcagataaaagtatgagtgactatctttttcattgttctacctttatgtggtatcctattcttctgcaaggagcatgaatcactcttataaaggaggataaaatctttgaaaattaaagttgttcaagagtaaacaacagaaagccagagaaggaatgactttataaacaaaatgctttgtgcagtcaaccttcagatgatttttcaggtctgtcgtttctctcaaagagatgaatactccgggcctgcctaagacagggtggaagctctgcagcttcagccaatctttgctacagttaggatgagtgaggatgttcacctggatagaataacacctggatttcttccgctttctgtgtacagtgctttgtcttttcctttgtccctcagtagtagtttgtagcatctgtacaatagctggcaagggatgcaactgttcctaaatgtaaaaacaggaagacacaaaggtttctgaatgatgtgctgtggtctctttttgacaaggaagaatgtaaagggaacaaaactggtgctggtggaaagaggcactacacagcagctgctggaaaactgagtggaggccatcttccttgctccttgtcacttgtgggaaaatctccaaaagctgccatagaacgagaggtggaaccatttaggatggcagccaaacacctgcagatcctcgtgattatactgcattctgtggctgtggatgaaagtttggccactttgtttcctttttattgtaagtaatgaatgatgtttttagagagtgctttgaatttctactgacttgcaaatgagtatcttacctgagatggacattgcatatttctgagagctattctttaagactctattctttaaggacttttgtgttctttggaaattgataccaaggaaacaaacataaagacaccaaagtgaggtacattaatatatagaaagtgaccacatttattgcattccctgtgaaagcaagatgctcaaatacacatctttaacccctacacagggagcatctaatacatacagtggctgtcactcctctccaatcccaggctgaaggccggcactgctacccattacaactctctttgttactaagccaggactgacctcataatgaaatggccctgggtggtgaatgccaataaatcagagttacccaagaggtgatgcctctttgacatgccctcccaccctgagtttgctaaaactaccagcaaaaggaaagacttcaaacagcaggagttgctagttgtttgtcaaaatacatttgctccttctttagtcgaaggtgcagatacagctccaggatccctttcagttcttgtgggcatagaactaaattctgcccactgtgatgtgagcagaaaggatgtgaacagtcctctgggttcaaaaggagaggagccctcttcttccttctcactggctgagggataaagaagctaaagcagccactttgcaccgaaagacagaagccaggctttgagaatggaaaattatctacctgagggagaagtgaacttctgtcttgtgccagccgctggatatggggtctcctgttacagtggcacagcctgtacctcttccaatacatgtgaccagcaggagaatcccctttctttgcttttctctggggctccttgctctgttccaactctctcgacagccctccatgatctcaaggcttgagaaaatagagtagctttcttataaaaatatcaaggattgctgctttggaacgaaaagctgaaaagaagtgaatatatgcaagtcataaatcaggaaaaggggaaaatactgactccattcctgcctttggccctgtgtgtggtccaggaggttgaagaaagttacagtcctcaatggacagaggagtgaggaacccagattcaccgggtactggcaaatttatactttgcacaaggttttctcgttaattttttttctgattaaatgagatctaatctgaagttgctttttaatgcacacttttgttatgtgactgtgttttcattcctgccccagtaattttctttacttgtggcaactttctttgatattggagaacatcaatgtctccaaatctccattctaatcaacaagaaaaaaaaaatagagacagggctgaattgttcattgctgatttaaaaataaacattttttaaaaatccacatttgtattccactctagtttgcctaacattctttttctaatgggaagaaagcagcatatgcagagactgggtgcagacactccaccctcaccgggaggagggaaactggcctttttcaaaataggaaaaatcttcctttgttatgagcaatttcctagtgacagaggcaaccatctatagacatttgtcatgttttctagaacctactctttggacaacaagcaattgcccaggtgggagagaaacatggggtgtgaacaggagacaatcacattgcctctcattatggcatctgcatccctccccagctgggcaactccgtatggccagaagctcctgttgttttctgcctcagatgacccagtggtgatgcactgagaaaacaccgctgtccattgggtccaacacaattcctgttgaatgaggaaaggagaaacagttggtttggaccctctgactcccaaatgccatttttgctaagtatgtaagaagctagaaagtcttacccaggatttgacatctgagtcaagagctcaaaagtcaataatgtgacctgaacctgaaccttcgcgaacagcttccaacgcctggctgagaagaaagggctcgtggggtatttggttgcatttctcttggccacaaaggatcctggttgtttcaagttcctctatttgaagtgcacatttcctgttgttttaatttgcttgtgagtgcacctcctgagaacctggtctctgtttcattcactttccgtgcattcctctttctatgcttgatgctgcagcttgtattgttttcctccccttctctctctttcctactcccctcctggtgttctgagatcatctcccaggtgaattacctgcactcacatctttgtcacaggcctgctttcggggcaatccaagctaagaacacacacagacacacacacacacgtacacacacacacacactcgcacacacgttttgaacaagctcagggaacaagagcagatatgcaaaaaatacaattttctttatttttagagacaatttattactttcagccctgattctcactggtgtctaaaggaaattaagattaactcaaccttcttacccatgatcctcccaggagtgtgtgttactctaggaaccttcagcactgtgtttaacaactggtctctaaaggctcattcttgggtgtcctcgccttgtcctggagtccatcagctcagcacaccatgtctgggcacatcctactgttcccatggcatgttgggtggaagtttacagaaataaggcatatatatacttaccttatatatatttacatttatatatataaagtatatgtacatttacatttaaaatttacacagttttatcccaacaagcagcagttcaaatatcattctagatgtcatgattttttttccctaattgtgtgtcttgtttttttgagacagggtctttccatgttgcctaggctggtcttgaactgggctcaagtgattctcctgcctcagcctcccaagtaactgggattacaggtgtgcaccatcatgcttggctattcccctaattcttaaatgttggtggccagaaaaagcacttggcatttctaaactccattgtctgaggtctgaaatggggcccaggaatctgtatgtttcaagggcccaggaatctgtatgtttaacagtgcccaggttaggaagctcatgggaagaacataatgaagtctaataaaataaatttctgatcagacatgtcttacatcccagctctcatcttttttggcggaatgatcttgggggaggaacttaatcaccctacctctcaatttcttcaacaccaaagtggagatcagagtgcctacttctcaagtttattctgaggatgtaatgaggttgtaacagtgaaacacagaattcacatatttgttcagcacaaatatgtgctggacacacgtcatccaggagctctgggacaggctctgagcagtgctgtgccttcaagaaataaacaagggaagtgaagtccctgaaggtgtgtgcttgacataaagaaagtgctcatggcttttggaagagaactaaaacaggctgttcctggggaccctggcctttcagctcaatcccacttcccaggaaaggcacctgggatttggatttattgatgcacgaccaagcgacatgaattaatttgagatcttttatgtaaatggcatcatccaggtgcagttttagtttaggctctctcagcagcacaccctgtcctgcccaaggttcaactgggaggaggcactcccaggagaaactggcaagggatctgggagcaggacagggaaaggaaggaagtgaaatgagggtatgatttcaggtgaagtctcagcctctgcgtgattccctagggagctcttaacagtaagttataaggcagagtttttggtcaagggggtgaagggtctctgtctgtgttttcaaggatgttccagtgcccatgggcaatctctgaagattgtaaatgaaccctcatcagcagagcttgcagctgctgggaaacaggggcacagagctggtttaaaaagggctccaaaggcctctggccaggcaccacaaccaactgcccactacagatgtgggcccaggtgttccggctccactcccagggcttctgctccaactcttgctttggattctaagtggatgacccaccttaaagccttggagctttagtgtccccatgattaaaatgggggctatgatggaaacccataccttgtagtctcatgcaaacaataaaaagtcttgcagtttaaaaatcatgatgaatcattgtactaccatcctcattttccacctatgtaaacagatgcagcaagtatcacctgcccaagattgcacagctgttaaatcacagtagcagtcgccttcatccaaggtttgccgtgtgccgggcagtcttccaagggctttacatcagttatcacacttaatcctcaaacaacatatgaattaacattatggttagccctgctgaagggatattaaaaataataataataataataaataacttgcctaagatccaaaactagtggacacagagctggattttgaacccaagtctgtttcactaaattggtcagctccaccacattctctctagtatttgattatttaggtgactctgggatcctttcctatctaccctggtatctccagtatctggcagactaattagacatttgtacacatttgcaagaagtaaataattttgaaaccaccttgaaacactttggcctataattgtaacttggactagaatgagcccaacaacaacaaatttgtgaaaatcagccttattaactcattcaagaaaaatatattgggcgcccagtacaggcttggcattgtgttgagtattgcaggaacaagggtggaatcagatctattttcccagcccacatgaggcccaaggagttgagcagggctgttcatttagaaggttcccatgctcccaccatggtgtctgacaatgggcctctggcacgggcctggccagtgtgtgctgtacagtcctgacactgcgccagaggagactcgggtccatctttccacttttggcatattggcaattgaactatattccttttctcttctcctttccctctccccttctttccctatgattatcagaggcaaatatctcagagagttataattagaagaaattgagcagagggtgggggaaggggatattgtttcagaaataattctgagtcactggatcaggtttctcaatgtggaacatgccatgaaaatattctcttacatcaagaattagaatcacttcctgcaactcctatgtgtctttataattagtaactgttaagtatttctagaagagagggttttctttgaattgtttacctttttctgcatctgtgttttctatctgatgggcaaaaacacgtgttgctttttaatgaaagaaaaagtaacgtaaacatgttttcttttgtcctcctctcaggtttggtgagtaattgtggtgatgaattgtttttcattctatggcgaggatgaaaaggacactttctttgcttcttcacctctgccccacaatggagagcggcagcgcctctgaaggcaaggggagtggggtttccgaatccccaggagaaaacacaggtctctgctgcggcggtctggtccagagaacctacatccggaggctttcatttcctcatctgtaccatctcccaaacagacatttctgagagtgaaaagaggcaccattagaattagcctgggttagccagaaaggaggtggtcttgggcaaaactagatgtgatgcgatcccaggggactctagggtctctcccagctgagacatcctaaattatgaaaatgcaaggcccattctgtatcccacaagggcctgagtaagctccgtgagccatcataagctgccaacctttagctgcacaagagaaatgaactctgtaggggacatatccaattccgatttaaatttaatctgtgtggtcaattatttgtgtaataatggaggaaaataaagtctatttcacaaaagtcaactctgtaattttagagcctttaagacatttgaaaatgccttgtgcaattatgtggcgcttaatactcagataatggaacaatgaaagatgtatgtttgcattttgtaaaattaaactgtatgcagttatttatcttttaccttaattgtttgagcttgtttctaatgtaaactgttgtaattttaaataaatataatagaaaaaactttcataggtatcaagaatccagagtaaatttactttgcaaataggctttgtaggtatgttttatgctgaggatcttaaactgacactttcattcaaaaatattttgaattactcactgtttgcctctctgaggtcagacagattgcaaggagactagatttcacaatggagtttgggtgacttcatcttattccaaagcctgaaatatgataaatgtatgaaataaatatgtgagaagattgaaagtgcattattgattgactttttaagtacattgatctttatgcttttatttttctgtttttattcttggttccattttacatgctcaatttgttctcccctctagtcatatttttcatctacttaactttgttagcttgatatattatggaggtttcagatttggggatagataaggcaaattatggtatatgaatacctttgataatatataaaatcgtcagtataagacaaatatactattgtttaaattccaatgctgtgagtcgtcctgctgtgatattcacagcatgactataaatgtgtgtatgataaataaaagaaagagggaggccaggcgcggtggctcatgcctgtaatcctaacactttgggagctaaggcaggcggatcacttgaaatcaggagttcaagacaagcctggccaacatggtgaaaccccgtctctactaaaaatacaaaaattagacaggcatggtggtggcgggcacctgtaatcccagctgcttggaaggctgaggcatgagaataatttgaacctggggggcagaggttgtagcgagccaagatcacaccactgcactccagcctgggtaacagagcaagaccccatctcaaaaaaaaaaaaaaatgacagaggataaaacaaaaatgattccccatgaatttcagggccctgcgggatcatgctcaaccacattcacccagtcccctgggtcagttggtttgatatcacttcagggtcactgagagtagggcagagtccttaggagcgtgaacctggaatccagattcaagtccagctctgccttttactggctgtgggacctcacccatgtcatctgaattctccatgcctcagtttccttatctgtaaaacaggtcatgaagaagaagggtcatttgttttttaatgaaaatttatgtattaatatatttaaaaatactttaaccatcatctggcatatattaagccatatatatatatatatatatatatatatataacaccttagataacattttattgttaaatcatttcagatttacagaaaatttgcaaaaatgtacaaagaactgctctaagttgctcaccaagattcactagttgtttatattttgacatatttgctttagacatcatagttttattttgctatgtaacaaattatcacaaatttagtatcttaaaacaatacacttttattaccttgcaatttctatgggtcaagagtacaggtacaggttagcagagatctctattcagggtctcaccaggctgactttaaggtgttagctggagctattctctcacctgaggctaagggccctcttccaagctcactttttactggtcaaatttagttccttgtggttgtaggactcatgaggttccccattttctcaccagatatcagccagggatcaggcttaactcctagaggcttcctggcatttcctgctgagtggctcttcccatactcccacaacatgttggcttgctctccagcagcatggagtctttctgatgcttcaccttcatctaatgggctcacctgcttaggcaaggtgcacccaggatcacttccctttggattaactcaaagtcaactgatgagtaatcaaatcatgggagtggtctcccatcatatgcatacattctgctcaaacccatggagaagcaattaatttctacaccctgtgtaccagggtgtagaaagcttgggaactatcttagaattctactatattcatattttttcccgagctgtttgagagtaagatacaaacataatgcctcatcatccccaaataatttagtatgtattttctgtgatctaggacattcttttacagaactatagcataattaaaatcagaatttaacattagtatattactacttagagaccttactcatgtgttgtaaattatcccgaaattatcctttatattaaatatatatatgtatatatatgtgtgtgtatatatatatatgtatatatatgtatatatgtatatatatgtgtatatatgtatatatgtatatatatgtgtatatatgtatatatatgtgtatatatatgtgtatatatatatgtgtgtgtatatatatatatgtgtgtgtgtgtgtgtatatatatatatatatatatatatatatatgtgtgtgtgtgtatatatatatatatattccaggaaacaattcaatcacatatgttgtatttgattatcatcattcttcagtctcttttaaatctggaatagttccttaatctgttttgctttttatgaccttgacacttttgaagaagataggccacttgttttatagaatagccctcatttggattttgtctggtatttcctcataatgagaggtaattgatgcgttttcaccaggaaaattgtggaagtgaggttttatcctcctcagtgtatcatatcaagagacacataatgtgagtttgtccagttacttatgatcatatggttaagatggtgtctgccagattcgttgccataaagttagtttccatatagttacttctactaattattatcaaaaataagcattgtccagggaaaaagagttgataaaaaaagcaaaaataatgaatgattgttgcgcatttctctacaggccacaaagcacttggcacgtaaaccttagacagttagagaactcatctgagtttgggcatctgtctaccaggctcccaaacccttgtctttcaagtgtcctgtcccttgattatggagttctccctcttatcaagattctctctctctctgctgaatgattcttaataccacatcattacaccttagtttgtttcatcaaaaagtgtatcaacaacgtcttcaaaagagttgcttacactcacagtcttaatctacttggcatagctctgagcaggctcctgtcctcagcataccaacaagaacaaaacagatcttattaaggtcaccaagactccccatgacattaaatccaaaggacatttttttctatcttcatcatttttgattatcaacggaatccaacacagccagccacaatctccttgaaacatccccaatcttgccttctctagcagcacattttgtgggtttcctcctgtctcactggctattcctttggagtcttaaacattacctgggagggccactggattgactcatctctgctccccagggcctctcatcctccagcaggctagcccaggcaactgcccatggccctggctgggttccaaatgagtaacagcatgcaatgcctcttaagcctaagcttgttttgccccccaaaccccaacatttctgcagcattctatagggcatagtgagtcacaggggaagcccttattcatagggaaggaaatagatttgggaagacttgcaaagtcacatttcagaagatgtaaatacagggagctgtggagaattggcaccattcttgaaattaatctatctactcttaatccaccaaaaataattccaggataagaatcatgaactgttccttctgctttgtatctggggtcaggtacagttccatggttctcacagctcctgacacatactcagattttctcaagtttttctgtaaaagacatcagcttctcccacacctctgcaatttcctcgtgatgttgaacttcattgatttctctttttgccagcctttgcatcacaccaagttccaaggctggtgaacaatgtgaggaggaagtggaggtaaagggggcaccttgtaggcactcagtcaagcaatatgatcatgagttcaacttcattcaaatttgaatcttctttctaacttcacccagctcagatgaattactttttttctgccatattcacttgttcttgttgaaaaactgagattattttttcctttggttgaagaatcctctgtccctctattattttgatttatttcttttccttcctgagtgatttctttctgaagataagtccaaatttacaagccaagtagaattagaaatgaagattgtttttcttcttttactaaaagagaatataaccaaactgtacatgaattggagaagggctgcccatcacatccttcctgcagattacagtatccatgaaggccatgagacccacctaagcatcttctttcttggagtatcattggaatctcccaggttatttagaaatacacacgtccagtgacccctacctatggtaaccttctaccctggagacattggatattaagaggtgagctcttctgtaggttctgggattcgagatagtaagatatcctattctacaggagacagcctctccttgaagacagatgggtgtaacagtcacaaagcaatgataaaagttcagtcccacatgtcaccagaagtgttctaagggcatccatgaaggtggggaggaaaagtgaggtatgggacataagaccaaccgctctatgagtggttcaaggttcaggtagcttttgacagtgtttatgagctgtgtgagggtgaagaagtccctttcaatagagaggagatacagtagtgcagtcatatttgacctttcaaaaaatgtgggatagcatataaaatatgctacctattttgtaagaaaggggaaagtaaaaatctatgtttgaatgcgcttgtgtgtgctaaaaatcttggatgattacatgagaaactaagaacaaggattatccaatcagagtcttggtatatgggaccagaagggagataattttacagatataaataatggataattttattctatatcttttgacattttctattttttgaaccatgtctaaactgctcatttaaaaattttaagtttgaggatctacacataatattagctctactcttatccatctatagagaaaatatttaaagacagactgttactgtgaactcagcaagatttttacattaattgtattttatcaatcacagtagcgtttatctgtttgatatagaatggtgcaaatcactttaagacagaccatgtatgcgggccatggatgatgcttagagcatgtatgatttgtggaccctgtagtgactccttctcatgccacttcccagggacatcatggccttctgcaaagaggtctctctctctctctttctctctctctctctctctctgggtacctgtgcatgtgttgcaggtgacctgacattcttggatcactctcccagaaagccatgtgttggacccctccctttctatcttaaaatgcccgatgttagaagctcatagtagttgtaaaggagctaatgtgatgcttaaaaagggctcaaaacattggttcccccgcccccacccctcagggcctgggaagtttccctttctctttgggagaaaagttgcttttcatttttcacttgtgcctgtgtgttctctgttacgttattactatttccatcaaaaagcattttatagttcaatgtttgggggaaatacagtcccataagcaggcccctattcaggcccctatccagcctcctcgtccttttgcctcctcaccccttcctagggcccataccttgcagtgccttgtgtgaaattttcgaaggcagtcctcactcacagccccacttggaatgtcacaagcatttagcagattaaaggctctgaaaagccctgcagtaaagtaatgtttaacttcaattaaaccaccctctctcaaattcacttgactgctaaactctttttcaaagaacacctgtatgtattccaaaaagttctggattaaatattgttaacctctcaaagaacacagggtggggcctatttatcctctgtgtgccttcaaatcccaggaggctcaggccttttctgcaataaaaaatgtattcataactctttaattgctctcttcccttcttcctctctgacttatttgtataatataaagttagtgcgctatatttgaataacatggatagaaataaacttttaatgccagaacctcctctcaaaaaaaagtggtaaagctagaactctcactgtagttgcctgtaatttaaagtgaaaggctccaaacaggtgtttcccctggaagaaatgttcaagccttgttaagagtctataatatgtcaatatacactgttaaaagagatgacaggtcatgtgccacatgacaacagtttagtcaagatagactgcatatcaaatagtggtcccataagattataatattgtatttttagggtagctttcctatattagctatgtttagatacacaaatacttaccgttgtgttacaactgcctacagtatttggtacagcaacgtgctgccccagtgtgtagtccaggagcaataggctaatgccacatagcctgggggtgtagcaggttctaccatctagatttgtgcaagtacactccatgatgttcacacaacagcaaaatagcctaacaatgcatttctcagaatatactcactcggttaagcaacgtgtttgtacttttcttgtgacttgaatcacttccgttttaaatctgtaagaagctgaaatactatatcctctttctttcttttaataaacgagtaggagacagtgcacctgggctcactcgtcagagaggctgacccatgtgaaaggcaaggagtcctgccccagtcactcatgcctgtcgcccattattttagtgaattgtggtgaaaaccccagctccatataggctggctgtgtctagatggtacaactgagtcagctggggaacacacaaggcagcattgcagaccatcattgcaaaatagctgtgcattccttcacctgagcttttgtgacgggtgcattgggttggtaaaatgactaaaattattcagttgcccctgttccggttgtagaaaaatgctcttcacacaaggaatgtttttgtggtttgccacatttggaaatgtcagctactttggaaatgctgtatttagcctcaaatcccacacccattcaatgctgttaaccagatctccagggtgtagcgacagtgcaagtccatgtattttgagatctattaataccttttggttaccaagtggcatttgcttcccgtatattgccatgaaacagaacagcaaggtccaagtttgccctggtttatgaaaaggacctcatcgtactgagatagtttgtcaaagttaaagttaaaatcccagaggggctttcttattctcctgtcctcccatgaatttttgatgcatcagaaaatcacattttaaaggcatgaaagtggggtgaagcaacaattttcaccagaactgtgagtgtgaaggagtgtgtgtgtgtgtgtgtatgtgtgtgttttgtttctccaagtctgtttaatgggaatactcaatgttaagtctcccagtggtgcctgaacttatatatggtaatattcacataaatgcaatatgtgcttcccttttttgacatatatataacttgtcatttcatttcttgggactaataggcaaaactaatatttctagagaaatctgagaaagcatgtgtgtgctgtatacacgtgtatgtccccagagtgttttattgcttagaaaccaaaagggatcacaagattagaatctgtgcagggcagcctaacctgaccctgttcattgattcattcattcattcagtgggatttgagtgccaactgcataccaggactatctggatgcttcactgaatagaaaccacccactggacttattttgggggagttggtagggaaaggggaggatgacagaccatgaagacaatacttgagtaaattgctctcggccctcctctcaccccaagggccctcttgggtagggaggggttgggaggtcctctccttaagggaggggtctctctcaagcaccttccccctgtagctaagcaacccccaactagaccatgttacttaagggcctggctcaggtcacctgcccccttcccacaaccccactctccccgaaatgccaacctcatcactgtgctgattcattccaagccatcccctgaaacctaaaatcctttaaaatgcctctacctctttctttattaatccacccatttttcagatcaccgaggtactttctggatgcagaagcaatcggagtgtctgctgtctggcagcagctggtctctaaaattgttcaggtcatcatgtcagatcttgagatcgggctgagaatgcgcttcctggctggatgacttgggtctcatttgactctgtccagcgagagacacagctctactctttctccccaccccaacccacccctcaggtgctctctttcccatttccactttctggatgtgaggtctacccagaccctcctttcccaggtaggcggtgtccttggtttcgggggtatgtggcccaaatcccctcccttgtcctgccccagtgggttacaggaactttcttgcccaccccccacccagatacgaggggcgaatgagtgagtgtccaagtctaactcccatgtgaaacactttctatggaaaaactaaactccagttggtaatgagagggagacaccacattcattcattcattcattccaaaagcattcaccaagaactttctgggtaccaggtccaggcagccagggatcctcctggcactgagaggcaccaacagacagcacaggactggcccatggggtcaccaagggagtgcaggcttagtggagggagttccgtctttgcctggggaaaggaggcagtttacttaaggattagctgcccccacctgcatggaaggtaccttctactcttccacaatgcaggctattcaggtctgaaaataacaccgtgtttccgggcctgggccttgagccccaggctgaccagaagctaaccagcttgatctcacattagcagcttcagcttgttggctcactgggcagtgataaccatgccagggtctcttccagcctagacaggctgattctatgaaataaacaaaagacatctgagatgtttttctcatctgagacacgggcccctgggcaaactccccactcctgcccagaaactgaggccttccaaccctttctcctgtactccagagcccctggagggagcctggctgtgcccttcaggggcattctccactccctgtcctggtgaaacctcaagaatgaagcgcttccttttctgagaatagccaccacattattccattcatgaccccatgcttgcagaaacgccatggtcctggaagcagctagaatagcattgtggcttgccaacagtcccatctgagggtcatttattgcacttctctgtttcactttccttgaatatatggacaaatgcaatagtttgtgaaaactaaaggtgaaatttcatattgcttgtatgaaagcaaaatatcctgcacgaaataaactttccaaccctcttttctccctccctttttcctctctgtgcccccaacccctcccgcctttttctctgccctgttctttctcctcgtctccctctcatctggcatgcctaatcaatggtacctaatcactcctctacaggctgacagatgagaagttcactgtatagagatgggtttcagaaaaactggcaacatctgtcccattcctaactccacctgataaccagttgtgttagtaacatggtagaattcaattttgtgttttctgttaaaaattcaagtgcagaaatctggctgtccagggactagaagagcgtacctatcctgtctcctttgcgagtaccacttgggtggtttttctctcctctcctttagatggcaccagtttattgcagtgtggccacccagacactcccttctgctacctcaattagtattcattgtgcaaaaataagaaaattccttcattacgctggtgcctggtggcaatctgataactaaggcggtgcatctgcatttccattataaaccacatttctcacttagggttgtcgctcagcaataaaaacttgctagcaaggtcttaaccctcggacatttaaaaataaacattgcatttagcttttaaagggtctgtcttttcctaattatatatgtcaagtctgagaatttttttttctccatgtgaccaaaaaagaattaggactttatctaggtttttggaaatttcaacaaggtatcagtttgtattaaaataaaatgcaaaaagtgaaaggtatttcaatagaaaccaaagaggaatataatccttttaattttgaaatttatcttcccagagatgtgaatgatggatggtctattctatcaccttctactttttgtgtctctggtcaaacctgctacaataaggcaaagctaacatctgcaacaattaaccagaacttcgtccacagtgcattcctttaggaatcacctagatcctcactgcatttgcttctccactgtttcaggagaaactcagtcataaagcgaatgcagaggtgagggctccttgtcgaaggcctcagccacccacattcacagtaaatggaattaccttcttcatgggcccacttcaagactcctgtgtttttcacaatagttcgtatttcaagtattctgtcctgttatcaggcattgtatcaaatcatgcatcctgttttttgatcataaaaatatctggcctggaaaatatctggtcagattgggtttcccagtctggaactttttcacacacggcttctacatgaaccaaccaaaataaaatctcaaatcaatgttggctttctttcatctgtacagatactccttcttttaaaaataatttgagattggtagttacttaaatgttttctgtttaactctctgaatgtcattaaaattggaatttgtgaattaacataaaatagcaaagtcgtagattttcatcaattataatgcttccctggtctatattcactttgtgtgatcaagctaaaatgtctcaggtacacatttgaactgatccacatagaagagtgacatttgaatgtttgttactgatctctctccatctgctattagctgctattgatgttaagtgataccagtttgctcaactgaaaggcagatttgggattaaagcataaacaggtcacagttataagagaaaagaaatgttgcgcaccagagttaattgattgtttctccctcttgggcagcttctgaaatgtatgcaaatgactagagccacagatgaaagaaagaagtgaaagagagaaagaaagagtcacacacacaggttttatgggtctgtgctactccctgaaagtatatgtgatgcctttgaaagggtattcagagatgaatcatgagaatgggagtagaattacttgtgtgtgtaactgacacaaatgtggaaaacaattcctttctcttccttgtgttggcttcagactgcaatccccatttcccaacataaaaaaatagctagatcttgaaatgccaatttaattgtaagtcaagatggatcaccaggaagcctcagctaggcaggacttgcccaaagtgaggtggggatagcgttggagcagagtagcagaaagaaattgtgcagagaaagcagggttggtaaggtgtatcacaaaggagagttgactctaggttgcagcactgcagtaaattatgaggaagaggatgggtgctgtcactcacagctaagtcagttaggaaagtcatgaaagagaaaaaatgcaccactatggtggtgcttggggtaactcccattattcagtgaagcgagttggagcagaaacttaggaggccactgaggtttcagagtgtaagtgactgcagaaggataattttcacccaaaacatcagcatggaaaagtgtaaccactattgaagaggttgagaaacttattttataacaaaaccatgtctataactaaatgtgtctgtgcccttttaagttgcttggggatggaacctgctgactaggaattataccccaattcactgtggagcaggggtcccaaagagtagcaacaaaagatcaggtgaggctgggtgcggtggctcacgcctgtaatcccagcactttgggaggctaaggcgggaggattgcttgagcccaggagtttgaaaacagcctgagcaacatggcaagaccttgtctctacaaaatttattttaattagccaggagtggtgacatgcacctgtagtcccagctacttgggaggctgaggtgggaggatggcttgagcccagaaagttgagactgcagcgagccgtgtttgtgccactgcattccagcctaggtgacagagggagatcctgtctcaaaaaatttaaaaaaaggtcatgtgggtctctaagccagagatgcacctgacctcctcctctgccagacacactcctattcacctttcaagatccaagtccaatatcaccttacacctgtttggatggctattatcaaacaatgaaagagatattaaatgttggcaacagtgtggggaaagggaacccttgtacactgttggtcagactgtaaattggtgcagccattcttaaaaacagtatggagttccctaaagacattaaaaatagatctaccctatggcctaaatatctatcttctgggtacatgcccgaaggaaatgaaatcatcacctttaaagatatatgcacttctctgtttactgcagcactattcacaataatcaagatatggaaacaacctaagtgtcccttgacagacaaatgaatgaggaaactgtggtgtggccaggatggtcttgatctctggatctcatgatccacccgccttggcctcccaaattgctgggtttacaggcgtgagccactgtgcctggccaggaatattatttaatctttaaaaagaaagagatcctgccatttgccacaacgtggatgaaaccggaggacattattctaagtgaaataagtcagacacagaaaaaaaaatttgcattatctcagttacatatggaagctaaaaaaaagtcaaatatacagagatagaaaataaaacagtggttatctggaccaggggtggggtgggaataaagagatgtaggtccaaggaacaaagcagcagctatacagaatgaacaagtctagagctaaggcacaataaggggactacactgatgatattgtactgtcctcaggatttttcccaaattggtagattttagctgctcttgccacacacaaaaagagggtaactacctaagatgatggatatgttcatttgtttcactacagtaactattttactacctctatatatcccataacatcatgttgtgtaccttaaatacacataatcaaaattatttttaaaaacgagacagagaaagaaacactcaactccacatgccccaccccctgtgaaagtttatttctttcctcacacccaattcttcctctatagcattttgttcatacttcctctgtatgatatttactgctataggacacttaatagattaaaaagctgatcatcccatatgactgagttcttgatgagttcttgagtgcttcaggatttgatcttagccatatttgtatcctcagcatttggtacaaggttttcaggtaaaactagataacgtaactggttattggctaatggacaggtggatacatgcatggatgttgggagggtcttgctctcgaattagtcctttatgctggagtggttatgaagaaataaccaggggcagaaagccagacatttttcattatggcaatggcgcacacttttgtcctgtaatttagtttgaagacaatgtccatacaccaacctgtgttcccgaataaatgcctaagacttcttggggtgggtaggggaccaatctaattgaggatgtcattccattattggccctgggacacatgtccaccctgctactcttggagaaagttagtttgtaggaggcatttgctggctggagctgcggtcagtcagcagtgaatcattcaggtgccctgcagccgtttcctaagagaccacacgctgagtacctgctgaatcatgagcttccgttgagtaacaatagccactctgacaagctggagggagggttttgctggagcagatacttggcacacacctgagctgcccaatctgaaattaagggaagaaaaagggaaatgtgcagcttgactcaccgataatctatcgtgatgggagttgctcccaaggcaatggtgtgttttcaggtcagaagaagccaggcaaactttttacttcattcatttttaataggtattttcctaccctcctttatgttgctatgccatcatatgaaactaactcccttttagttctcactacataggcactaacggcctacttagtcatggaaagaaaatgcagccccacatcttctaaaggaggggatactttataactttctaccttaaagtggatgctaaaggccaatgtgtgaccaagaacaaatcatgaggtggttccaatgagactcaaggaaaacgttcagaatgcagacgaaataaacttggagtttggaatggataaaacttcttgactgaagtttaaatataaacccagatttctaatcaccctttattctccacctaaatacccataataatcttctatgatgcttgatatcattaaagctccaagaccctgcacagtattagagtaagaaacagcaaagattctctgggccttttattatagttctaccaattaaatgatgcttaagccctcatatgaaactccacatttctgtatcataatatatacaagagatcattttggtaagaggtatttaaaaggctggagtgacccgttggccaaccaaagggataagaaatgtggaagagtggaatacaactttgattgttagtagcaatgcactgggtcagagtgactaggctgggactaacttcagttaggaaaatatgactagttaaaaactataaaaaacactagcttttaaaaatatatacctttttccacctgtccctgatgagctctttgcttttcatgttgggtcttccttcttctcattgagtgaaattgaataccctgcatgaagctcatgagaaatccagttatcagaaaacccagatattaggagctcatgagaaacccagttaccagtgttatccaaagcataaccctcttgttcttcatctcactctgtccataccccattctctgcctctctgcatgtgaattctgtttaaaatgaaatgtagtagtgaattgactcctagaagagacaggaccctgatggccaccagatctgccgcaacaatctattacaaccacagctgaaaggccaaactgttgatcaaattgtgtagttgttaattcaataccatactaaatatatgttattctttctactaaattgactgatttcatggaatttaccttttttccaataaattaaatagacagtgttgtatatcataaaacatattaagatatcacatatgtggtaccctaaactatttatagtcataaagtattaaagaacatgttttccaagaatatttaatgccatggggaaatgctcacaatatagtatgagggaacaaaggagaaaacaaaaacaaaatctgcatacaacatgaacttaaaatctgtaaaaatatatgtgagtatatttatatatcaaaatgctaactgagctgtattctcagtacttgtataaagagaagagaatagaaaataatgttctctaattttaaagagacataaagagaattataataatcaattttctgaagttctgctcataaagagcctactagttcactgcacgacagtatctagttatgaacatttgacttactaaactatagagaaattctgcctatactttacataaaaactcattcatttcaaacatccaggtgtaagatgagatcacctgcacaaaaatacaaaagtaaaatgaaaagaatattactcacttcagaaaatttaaaaatatggtttttcccttagtttcatttagagtgtgaaatttcagaaaggatttgtgaataagaaagtgcttgacttatcaaggaagaaaaacaccaacatgaaacattaaacctgttagactgttagatataaacctgttagatgcatttggcatgtcaattctataaaatcacacatacagtctatctataaaataaattatatcattatattttatagttaacatttttttcttgagaatgctccagtttttcaatgaatgagaagtaggaattatttcctttttaataaatgctccaggagacttaacctacatgaccccatttttatggaagatggttttatcttctcctgccactgagtcctcgcatgacaatgcagccttccgcttggtgaataaaatctcattcgaatggctgcacactcttgcttacattttgaaacatgtttgcattaaaatgtatttatggctgaaaacgttcatgagaagtccccctgactttttactctcccagggattattgatagggtttctgcattgattctatcaaactcattacctgagcttcctgtgcctttacttccccaaaagcaaagtgctcatcctaatcttcctacctccccaagagaactgggggtaacatggcaagcagcctgcaatttatggaaacatcctatacggtggccctggtattttcagatttaacatttacaagtggccatgcattaattgttcattttgcagagggacaaatttgaatagaacaaagtaagaggctggtgtacagaagcaaacacccaaactactgaatcaagccagccacgcaccaagtgtcctcacctgcctggctcatttacaaactccccagaagtggagtgccgacctcacgaggctagacaaaggaaacagtggtctcttaaagaagtgatcattgaaaatgttttattttcattgacttccacctccctatcacagaattattaaagaagtgatgggaatcaccttacactttgagttatatggtactcaattataaccaatattggggaacattatttgctagggtggtattttcaaatttagtgatgtttgaccaccttgggacacatttctatcagatgtgaagagactatgataaataacttcattattgggatagaaaataaatgcaccttttctccctgaaaactgcaattcatgcagagttctagcttgaagtaaataacttcattttacaattacctcttttgtgttggcttccaagacttctgccattttaggctgctaatgtttgcaaaattcatgcagtgggatgcaatggtgagtctgaccgctgcttgtcttacctggatgttgtgaatacctggatgcccaacccttaaggacaaggcttaaaggacaaacctgtagcacagcacccacgaggcagtcaggacaggtgactggttgtattgctagaagctggcacagtcattttcccatgtttcttaccagtgaacttccctggctccagggctcccaggttcacctctggaggtctgggctggtcttgggaatgtttggtcagtgcacctgtccctaatttctcttccatttcttggcgaatgaaggcagaataataccatcccgtcaaaaggtaactctagcgaatggtcttgtctcctgctctgccccacccctttgacaccccacccccatttctggccaaagcccagctgcaaggaggatggagctcatagcaaaagaagaagaaaacttctgccagttggtagaaagctcagtctaaacggaacattttgcaccaagctgaggtggaggacaatgcctccagctctcacagtaggaactccatcctggtactggcaaaatagctccttggtgttgtgggtgggaacaggctgcacatcaatgctgggacactgcccctggagaggaggtactggccttgaagtgttgcctctcaggctcataccctgctggaagaacaaacaaggagggatggttgtttgtgtggacaaatatggccaagttggaggtctgcctgtgggaggagccctgtctcttttcatccctgggtgaaggttgtgggggaaggggtggggatggaagacatgaaactgaggctgagaatgggagagcaaggaacaagattctgatacttatcagaaagggtaaacatctttttcaggttcctatcctgattgcgggccacctgtgttgttttcccatagattcaattccatctcttcattctttcaaccaacattcactgggtgcacccaggacggtgctaggtactgggaggaaaaataacacagcatggtctctgccttcagagagctcacactctgcttccagagcttaataaacatcatccactccacctgcttttcttttcatgtgatgtaattctcaaaccttgggtgagcaggtgccagtgggcattgctcccatgtgacaccagtgaatcatatgctgatggtttctaaatcataggaagcttggattggaagagaatgtagaattcaaccagcactcttgctttcaaacatgaacactgaagcctagatgtagccaaagcacacagaaagttaaaggggtggtaaaatcacatctcccagctcctgagtcccaatccagctctcctggtcctgcacctggtgcatcctgcccttgggagactttttccttcctgcccaacttgctattctgtggttgagggattttatccaaatgtgaacacagaggaagtattcatttagatttaaaaaatttttttttattatactctaagttctatggtacatgtgttgcgactactacccataaaatatttttggaacacagccttttccccttaaatagctcactaggtagtgaatcacctacaccagtagtagcagaatctcctttaggatgatgccaaatgcaaagtatgccttcaagaggaaggtttgtcttgaagcaggcttttcttcctgagaccagaaaatcccaaaatatgcttcaaattgctttctgaatcatctctttctttaagcaggtcctatggttacatggcaagttctaatggtgactcttctaaattatgaattagggtcaaaaatgaaacctgtaactcttcctctttctattgcaatccagggctactcatttttaaaagaaacattacaaaatctgagatttcatttaatccgccacacaaagaaaaaagatttcataagcgacaaaattagagttgaaattttaagtgatttgatataatttcactcatttgattctgcaacagtggaatgacattggccacagaagtgttacaaccccaattttaggcatgcagaatctaaattttaaaataaaggaatatatttaaaatcttaggtgactcagtcaactcagtcaatatcaccctgcaagctggtgaaaatgcctaaattaaaacttgatgctcacttctcagaccttgctgataagttacgttaaatttactactattgtcttgtcattcttctttaaagattactgctggacaaagctgatatatcattaaaacagtatgatatcaatataaaaatatgttaatgggacagaatagaaatccagaaagctcaatatgtataaaagtttggtacttgataaaggtagctttcaagacaacaggaaaaggaaaaaataaatactaatgagccaattctttaaatctttaaggaaaaatcaaaattacagcctcatataatatcatacatgcactcacatactttcagatgaattttgattttttaaaagttaaaagataaagattttcacgtggtagaattagaacaaaatcagagaaatagaggaataattttattgtagaagagtcttatgtaagcataagagcaaagaaagatctcaccaaataaataagcactatatatgattacataaaatataacatttcaaaatacatgcacacacacacatcacaatatacatgacagagaaaagactaatatctttactatataaggatattttataaataataaaaaaggtaaatacatcaatagatcaatagaaaacctggcaaaagatataaacaggcaactcactgaagaagagctagaaataatagatggtaaaatggatggcaaatatatgaaataattttaaaaccttgtgatcaaatgaaaatttcaataattccaacacatttatcatatgatatatatacacacaatattccacatttatcttataaaactggccaacatttttatttttaatgaatatgcccagcacttaataaaaatgtaggaaaatgaacattcatgccagcttatggaaatataaattggactaaccattctaatccacaatttgacaataaatataaaagccttaaaatttattctgtatgaagtaggatatatgttaggatatcagattctcctagggataataccaagggtttgaggagacgatattcactacagcatcatatgtaactgaaaaaaaaggatagggcaatctaagtatccagcagccaaaatgtccaaaccaatcatgaaatatgtgtacaggattggaataatatgaagatgacacaaatcaagcagtagacaaacacactgaactatggaaacaactgacagtgtatttctaagagaaaaattatcaaaaagtacatgctgtcgttcatttagccaacacattgagtgctgaacttaattatacaaataataatagcttatgtgtatatgtaaagaaaacacagaacagacataaggataaaaacaaatattacctttaagtgttgaatattataatgaagatgatggaaatcatccatcatctcactattgtttactttaataaacagtaagactttggaaatcagaaagtaataaggaagttagaaggtgtcatgctttaccacatcatacgttttaaaacatgccatgctctttcaacatgtcatgctatattgtcatgcttttccccataagttataatatgtcatgctttttattttgcaaaatcctttctcctaagagtttaataataatgatacaatgggatggcaaaatggttccagctgctttttttttttccttttctttttttaaccaattgccccaggccagtttaagagctttgatacatgatcagagtttcagccacagcttcccggctggttcagaaacagcagaaggaagaatttaaagtgcaagtagtggcttcagagtttcttggcctctgagtctcccagtcactctgcaccctccaaatcaagactctcccaagtttctctgtcacatggtgcatttgagagaaatgtagaagtgggactcactgaaactgaggctggatcctggaatcatgccttatgagttgcttacaagctttgttccctcctttttagtgttctcacaccttgttaaaacatcaagtgcaggttctcaatactgcaagagaagagccatcttcccaagcgattcaacagcaaaacatttagatttcctcccacaaataaatgtcttgttctattatgtgccagtataggaattatgggacatgatcattcagcaccaaatttaccttagatattacagtgatgtgtaagatatggcttttgttgacaaaggatttattatttattgtgtcaacaggtcttcccaatgctcccatgaaaaaaacttcccgtgacttcctttcacctcaaattacagctccctgggtttctcctccaacaccacccttctgcactcactatttctactttctgagcagctattgttccacaatttgtcagttggacttctgtaccattctccatcaacaatctactgaaagtggtctggtaaaggttgacagcaatccaagttgtgaggtccatcaacttctccatcatcccactgtctgaaacactctctctgtcaatcaccttctacctgcagaaaacgttctgtttcctgaccagtgacttagatttgcacagtgatcaagctttcaatgcttgtcttttcttgttccttggtctttctcatgtagacttaccagttcccttaaccttcaactatcttctcatattcacgactcctaaatttgtgtttccagctcatctctctcctggactaatacaaatatgaaatagcttcctgatcctcatcaattctctattcttatccacaccctcattccttacctattgctgaagtcatcaccattaccctctaactcatattcctatctctggccttatgcctatccatccctttcctttaaaattatatttctatgtcagatatggttagcgcctttaagggtccaaatggaaacttggagcatataagaaatagagtgcagctctcccttcgcactcttgactaaaatcttcaggaaaactgtcatgatctatatgaaaatccacaatgcctctgaatatgaagcatccctcccctggagtcatgcaatatccaaccttcatggccatatgcgggggttctggttctgttagtaggatcccacatcagaataaccaggttgacagaacacatatatgccatttaattataatactttagatcatccacatttccgacaaatggtcttttggctcctgcaccaacatcttcaacaactgggaactctttctgaaagtgtatctcttctttacagagttcagaaactgaacttgctgccttcttgaagcttttctttattgacaagtttttaaatattttaagaatattcggaacaagaaagcagaataacacagtgattaaaggtacaacctttgatgatcaacagatctgtgttggaatactttcactatttactaaatgatcttagacgaattcctcaattgctctattgctttgttttttaatctgcaaaatggggataatatcattacccatcttctcccttttagggttctgaggattaaatgaagtaatgctggtagtgatacacagcacccagtccatagcaggggcttggtaaggctggatacctgccctggctaagtgggtttttcatattttcttccacctttctctatattctgtaattattggctcttcccaagtcctgcccatattcctctatatgtggtccttggaaatgaggtatctaggcttgaatgaggccttcagatgtgatcttcaggtctcagaatggtaaacttactccaacttgcatctgaggcttaatagtattcatgcaatccagaatcttgctaggtgtttggagaaccacacaatcccttcaacctacaacaatgctgcaaagggagaagcttccaggtgctttccctggacctgaaggtttgctgaatcatggatcctcaagcttgcgttcgtgcgtttgtgctgggatccagcacagaacctaacattgggttctgttaaatatcttatcacttttcttctaaagaaactttggagactcttcatgacctacagaataaaatctaaacttagaaaacttgttgtctgatttccctgctctgcagcagggattcccagaggtaagtggatgccccttgcacttccaagcccactgttaatgacatgcatggttgtgccacttgtggtctggctaattgcatatattcgcctctctcctagactgtgagctccacaagaaattttgttctcccttgtgggccacgatgcctagtacagcatagataaccaacaaatatttaccaattttaagtcaggatttgatcctgacacctgctcccttcacctgggtggaatcggttggagatggcccatggcctgcttggagttcacgttcatgttgctttccatggttcctcaggggcctatgcaattctttttgaaagctcattttggctccataacactctagatgtcaggttttgcttccttttgttttttttctctaacagcttcattgagatttgattcatataccataacatttacctgtttaaagtgtaccactcagtggttttagtgtattcacagactcatgcaaccatcaccataccaattttagaacattttaatcaccccacaaagaaaccccatggagggggcaggcattccccattcctgccctccacccccaccccaagcccctggcaaccactaggtgcctcctccaagcagttcatataaatagacatacagtacatgtgcttttgtgactggtttctttcactgaacatactgttgagaatcagccatggtgtggtatacatcagttctttgctccttttgactgctgggtaatatccccttgtatggatggacacgccacatgttttgatccattcgtcagtggatgaacacatgggttgtttctactttttctggctatcactttcagtgctgtctggatatagtccaatgagggtcacaggagaacaagtagagggtgatttttaaacgtgagtaaatgatgcacacagaggtgcgttttaggccagtgatggtgcatagtttgcagcatgcacactgccaggcccataccctcttctgggttctcaaatcccttttctatgaagattatttcttcccttcttagttaatttccttagattcgataggcatcaatagtgtgctgtggacgaattccgccttctgaaagctctgtaactgggactctatgaacaactcgggtgcagagaaggatgagcctgttgagtgtgcaggatcctttactcagccttgagcctctctattcactggcattttacagtcacttcaggctggaagccatgctgtgtgcggtactcccagttcacctgtatgtgaacacaggacactgaggaaaagcatttcaacagcctgacttcctcagatacatacaacctctcctcccaccccacacaaacttgattttactctccttccagtgagggcaacatgtcaatctcttttcaaaccccacgtggaaagcctggctacagttttggtaacaatgaggtactttcttctcatttatgttagcactcttacctgcttagcctcaaaaacccccagtataaccttgcctgaagaagtcgctaaggatgctggcattatttgtaaatcgattgcaaatggtactcagatatgaagttcttctgcggtcttcgttaaagctttgtattattctatgtgaatataaatagataattatttacttaaaaaatattttgtgggctataaaggtaaatgcataaacaggtcctacaagaatattctttatttttgtaattaaaactattcatttctgccaaattttcttcaccttttatttcattcagaatattattattattattatttgctctactgtgggcaaagtttctagaatagctcaaattaaaaatatgtatatactccctcacccccttactctatttatgccatcaacttttctccataaaagaatctcattttatgctttcattttccacattgaacttttgggtacaagaaagtgggggtgaaatatgagttcagatgcctgcaattgtcttggaatatttttctgcacactcaaaagcctccattatgaacaaagtctgatgttcgttcacccagtgatgaatgctgacttagcctgagaaaaaactaattaaaaatgttgtggaaaatgcaaacgtggttgatttaaacagccaaaaggaattatcctcttgcagtgtaaactacctatggagtgttaaagttcttggaatcaattagtttctagaaaccaaacaaatgatgatcttactcttgtccccaaatgataaaacaaaggtttggtaaaagaatactatacattacagttttaacattggcgtttaaaattttctgtttgtttttattttctaatttttagataactaaagcctaaaactacagctaaataggatgttttaattcacgctaattaccataaaattcatgaggtaggattttttttcttaacctttcttattcacctactccttgctccagaatttcattttggagtttatcagaacaaaattctttcgctgcgctctccagtcctgtttgctgagttccgcagggtttgctgacaagttctacttgagtaaattgtatttagacaaccgtatatttcatttaggccttttgcaatgactgggccaaggtcagttttatattctcctgaaatcataaagtgacacttgagataaacagaatgtttactctctccatgtgagctgaggctgatatgtaaatttatccttattctttcatcaaatttgcatttgccctcttagccaaacactacagacttccaaatcaaacagttttgatgatggtcaactctttatgaccgatggccatatcagagaaaaagaaacagccatttagattaaaatgaaaagcacagtgcaacataactctcctctctaggttagtggtaattggatgaactttcatacaagaggtgttttgatgcttcgctgcttaccagtaattaccacgggcttccggctttgtgtgtgcctgtgatgtaccctttatctgtgacgaacacaccatactcacctatcatcattttttttccggtcaaataaaccaagtacctctaaatagattctttatattaaagaaggagaaaagaaaggaaggcgtaacagaaagacttgatcctctcctcaaatgaatacatttgctaactctagcaagaataagacacaataaataatgacaatacacaaggtagaagatgaaaatcagaactctagattttgtagactgttgtcttcctatgaggttattctgttttccagtgtgtgcgctctacagaggtgacttgtcgcccagggcaaggaggtgtgtcactcgcttactccaaggtgagctggaatctgttaggtaaaaagctcccagtgcccaaacagcctcgggcccggtgaaaaaagccactcccagcagcttaaatctctctgatgcagttaaacaagaggcagcctctgagaacgtgagggataaaattagtacctgtgtttgctttccattctttttgaacaaaaggagctatttctgtgttctgagtttgcagaacacagaggggattaagcaatgggaccacacaactcattcctttcaggttgggggctgggttaaacactcagcatagctccccgggagcggtagcgcccactaggttttattccctcctgaaagttgtgctatcggggtcttgctcaggggaaatagagctccacagccctgcttgtgttttgtttcggcaccaaatgcaatgctagcaagttcaaagcaaacggtctgcgagacaggctgcacaaagaagaaaaaagtggcattctttcaggagctcctggattctgcttcctgtaaggaataaaaaatgaagactgttggcgctgagccttgctaggttactgaagatctcccacttggaatgtcagacacatcagtaaacgacttgatccagaaacagaactaacgtaattcacgccattgatacaacaggacgagtgtctctacccaacttcagtgcttgtcttatgaagaagaagaccaagaaaaagaaagaaaggaaaagagaaagcaaagaggcaagggagtgtgggggaaggcagagaacacagtttccttttcagtgtggctgtcaaatggcgatctaattgtggccgggctgcaggagagcagatagcttttctgaagcccgcaagtatttctgccattcaccaggccgaaggatgccacacacagtctgtttgttcaacataagcaaacagattgtaaactggctgataatttttgtactgacaatgtcatttacagctgtcagcctttcgtctgccttgtttgctttattcaaatatgaaccaagtggacctcccttccagcgctttcttctgcattaaaatcacatccattcccttccaagctgtcttatctaaaattcattggaggccaatcagttggctgaatgctttgttgtttccatggaggcaagaagtctagtgtggactttcggggattaggaagtttcagatttacagccttgaagtgcgtgtttctttcagttagcttcttttgattgcaaagaggcaggacatttaaatataattttatgtctgaaccaggaagcagtgctttaaaaacgtaatcattctggtttgtggctccctcttgccagcacttggccttacttcttctggtttagtccttggaatgtgccaccctcgcagcatggattggcattcttcctctgcccctaggtcatgacggctccttggccagcgggcactgctcaactgcacctcttctctaaaatcctggctttgatcctgcagcctgtcagggtgtcacccacaaatcttgaagcctcctctgttgtgagtggaggttgcaataccttctgttaaataattcacatcggactggctgtctggtggcaggcaggcagctgcagatattgccactttgctcagagagtacaggcacagtctccttaaaaaaataagccagtggcaaagttgcctacttccctgcacctggtgctggtgagagttcctaattccaggatgtgcttaactctgaacttcagcctcatattttaagggcaacatcaagaaaaaagtgatgtttgttcctggggatggggagccttgctgcattcttgggaaaagagtgttcttttggcaaacgtgatttctggtctcttactcaaacaaggaatatcttaaaatcatccatgatgtattgggcaattcattacttacactgaaggctttaaaacataacatcactggtactctgatttgacttttgactgtggcaatttgtttaagtttgtttcccaatgcttaaaacggcataaagttaatcaacctcagtaagtgaatattgagaatatattatatgtaacaataaattcatcacaaaaacttttatatatttgggataatttcaagttgcatcccaactgaaatttgctgtttttttctttagatttattgcaaccaatctcaaatatttgtttagtatcaactcttagcttagaatacataaatcctactacaggtaccaaatgaatattactcatgaagtcatttgagaaaagtttgaggtagtgtccaatctcatgctaggtggaatttggtagaaagtatgtattttttaaaagtttcagagaaaagaagactcaatagaggttgccacatgggggaatattcattctatctatttagtcaacataagaagcatacaatactatgaggaagctggtaattttatgtgataacaagctgtgctattatagaatagaatgtattagttgcacttatgtgaactaatgtgttgtatggactgtgatctggtacataggcctgcctattctttgtttcgttttgttttgttttgttttgtttgagacagtctccctctgttacccaggctggagggcagtaacacgatcttggctcactgcaaactctgcctcctgggttcaagcgattctcctgcctcagcctcctgagtacctgggattacaggtgcccatcaccacacctggctaatttttgtattttagtagagacagggtttcatcatgttggccaggctggtctcgaactcctgagctcaggtgatctgccagccttggccttccaaagtgctgggactacagactatctgttctttaatatagaatgttattaacggtctggagtccccatggttacaatgtgtcctgctctcttggaaggccacgcaatttgctacagctgagaccttgtttccctatgacttcaaagaagaccttcttgttgtaaaacaaagcattagtctttgctttttatctttaagactttaatcctactctggtgtatgtagggatatttagctgtcaatatcctgttttttatgttctattgaaattataatcattttaatatgtcaattaaaataaaattgatctacttactaaatttttatgcaatttagatgctatatagttgatcagtcactaaagtatttatctgaacctatcccctaccatataaaaaattacagcaccctttgtgtgcaattccaaaaagcaagaagctctgaatactgaaattttaacatgacatgaactgtactgagaatatgtaaaatcttttattctgcatgcatttgctgcagaaatatttgtgtttaattatgagattgctcccctagaccccactgggtattttattaaacacatggaatattgttcatcttatctttaaaaatctttaagttgctggattctgaacactttcagacccaagggttttggacagcatagcacatacctgtctaaggtgtgtttcatggtgactctatgagaagcagattaacactcacacaaactattaagacttgtggctgaaaggactctgctgtgaacagacaggaagaaaattgtaattagaaaaggaaactaaaactttgatcatatatgagaatatagaggagaggaattggagaaacaagttgttggtacagcagtctgtaaagccaggacagctgacagcatcaatttgatgtttggcgaacaataggtggagagaagacaaagagttctaaagaaagataaagcacatgagagaaaatggaaataaatgtgtcatctgaatgaggtatattttctccttctttgcacagatattgcaactcttctacaagtttgaagttacatcaaaacaattttttaaaaagtcaataaaaccccaaaggaagcatcaaagaaagtgaagcactcacagaaaaacaaagaaccttctttgacgttttctcccttttcctttcaagtggctaaagtggaaatgagcaatcagaaatgcagtggaataagagagaatgtaagaataaagaaaaatgggtggagaaaaagaaagagaagagagaaggggagtatatctgaaaaccatgttttgatgttgtctaactcttcaatagtagcttaccgaacatcccctattgtggggctctggacacatatcttaatttttgtgtgcctcagtttcttcatctgtaaaatgggagtgacatggaatccatctcactggattgccatgaaaagtaaataaatagagattccaaaggaagtctcacaagcactcagcagatatttgccacatttgctattgtgatgtttattggcattattcctactgtgtgccagggcggtgggccacgattttctcattcattaccctctttttacttacaacaatgctctgaggtagatactaatattgttcccactttacagatggagaaactaaggcttagagagcttaaccaacgcaggacaaatatgtgaggacttgcttggaatgaaaacacatctaggattacagggatggaggaacaaggtctgagggaaggctcagccacaataaccacaggaggagactgcagcagggaggagctgctggggcatcacatgtacatggtagtgcagggggcctccaaggagccacatgaggggcaggtgagcaggtaagctgggcagtcctccctcttcctcctgtgctaagcaatcccagaggatacttgcctcagcctgatagtggtacggtagtgccctcttatgcttgaggaatacattccaagaccccactggttgcctgctactgtagatagtaccacaccctatgtacactaaataactaagccgactagtaagtgactgatggatggtggtgtctacagtgtggagatgctggacaaagggatgatttatgtcctgtgcaagacaaagtggggcagtgaggaatttcatcatgctactcagaatggcgcacaagttagcatttatgaagtgtttatttctagaattttccatttaatattttcagactgtggttgaccacaggtaatggaaatggcagaaagtaaaatcatgaataaggagggactactatattctggtaaatgtctaacaaatggctctctggcaaaaagtgtgtgtgtgcgtgtttgttacagatatctagaagaaaatatgggagaaaagttccttgacattggtcttagcaatgttttttttttttaatatgacaccaaaagcacaagctacaaaagcaaaaataagcgagcaggacgacatcaaactaaaaagcttctacacagcaaaagaaacaatcaacaaaacaaaaggcagcctatgaaatgggaggaaatatttgcaaaccataaatctgataaggtattaatatccaaaatatataaggaacttacacaactcaatagcaaaataaccaaataactcaattaaaaatgagtaggtatttttccaaagaagacatataaatggccaagtgcatgaaaaggtgagcaacatcattaatcatcagggaagtgacaatcaaaaccataatgagttatcacttcacacctcaggatggctattatcaaaaagacaagaaataacaagtgttggcgagagtgtgaagaaaagagagcctttgtggttggttggaatgcagactggtgctgcagtatgaaaaactgtatggagattcctcaaaaatttaaaactagaattatcatatgatccagcaattcctttttgggtaatatatccaagggaaacaaaatcagaatcttgaagaattatctgcaccctcatgtttattccagcatcattcacaataagcaagacatggaaacaatctaagtgtccactgacaagagatcaatgaataaagaaaatgtagaatacaatggaatactatttagcccttaaaaagacagaattcttgccatttgtgacaaaatggatgaacctggaggacattatgcctagtgaaataagccagacacagaaaggcaaatacagcataatctcactaatacatggcatctaaaaaagtctgactcatagaaacagagtagtggtgattaaaggctgggaagtgagagacatagggagactttggtcaaagggcacaaggtttcagtcataagatgaagaagttctatagatctaatgcataattggagaatgtattgataacttggaattttacgagagcagattttaaggattaacacacatacacacacacacacacaaatagtaacgagtagtagtggacgtgctagttaatttgactgtggtaatcattatgcaatgtatatgtatatcacgtcatctcatagtatactttgaatatacatttttgtcaattaaatatttttttaaaatattattaattataaattccatatagctaattgattttaacagaattcttttgttgattttgctgaacttttgccctcatagccaactacaaatcaattcttttttttttttttttttttttgagatggagtctcgctctgttgcccaggctggattgcagtggtgcaatctcagctcactgcaacctccgcctccacctcactgcaacctcaagtgatcctctcacctcagcctccccagtagctgagactacgggtgggcaccaccacacccggctgatttttgtatttttagtagagacggggttttactatgttggccaggctggtctcgaattcctgacctcaagtgatgcgcctgccttggcctcccaaagtgccgggattacaggtgtgacccatcatgctcagcctacaaatcaattcttgatcactctcagattctgcaaagaagcccctcacctcaatgatgagcaaatgcaactccaacatgaatgttagttgatgtttttgttgatgttaagtagtaaaatgaaagtgaaacaatgaggacatatattgggactttagttgttcatcagtggaatgaatggcttctttgttgaattggagaacagttttcaaatactcaaaaaatatttcctgaagtatgctttatgtgttttcataatataatggctataaacgcagcacatttttaagtttaacctgctatattaacattttctccaccactttcttaagtctagacaaacaacgaaacaataaatcaagctctgattttcagcatttgccagttttcacggcttggatactctcatcacagatgaattcaaactatcaacatgaacatggatttggcaagaggtaccaacaggataccagtatctacaggtctcatgaaggaggaagcatttgaatttggcttgtaaaacatggggaactttgtatagacagaaatggagggagaggacattcctggcaaaagacacacttaaataaaggcaaaatagggaaaccgttttgacatagagaggcatcaaagggcctacagaagacaccaagaaagacatgcaggaccttgggaaaaagatctggaatgtgatttcaaaggactctgaattcctttcttatcctatgaactttccttttatcccattaaaggtttcgtttccttttgcttttgtttggtggggaataatttgcatgtttgtattgttttgttatatggaatggaagacagaaaggaagcaagaaggatggtgtgaaatggtcagatttgatctttaaggatagtactctaataaccagagttgtggaagggatggaagctgacagactagaggtggggaaagttgggaggaatttacaaaagtcagcaccagagggaatgagactgcaccaggccacagcaacaagaatgtcaggtccagtgggcttggatgaggcctaacttactgccctctatgtccccaataatctaaacagggcctggcacacagaaggtgctcagcgacatttgctgaaggaatgaacgacggaaatgtaaagtagggaggaagggggagagatctcaagtttgttcatatcaggaaaatagctctgaataatactgaattctatataaaaaatgtaatgcattctgtatcagagtttccaaaaaatatttttaaaaactatgttgctgcttaaaccagctctgacgggaagttgaaagtattgcttataagccacaattttataggaatcttatatgtactattgaagtaatgtggataatgtaaggagatttttctgaatgtagatcacattatttttctgggtacttgccttattctaacactaccttcattctttgttccttcttccttttcaaggggttaatagtctgcaaagaatctattaaatgcatttatggaaacttctcattatgaaatgcttcttaggaatccacccagggaataatttgggactttttttttaattcaattacttctttttcctctaggtaggaagcagttgggaagggttatactgaactacaggaattaactctgaatccaaattttgaagtgtgttagtggcggcaaacttccttctccgaacattggtatgactcagtattaaagtgctgggctcctggatgataagaagtctgtgtgtgggggtgaccattgtatgtacatgttcggttaatcattacaggcttctctgcttatcaccacagtggtgctcaccacaggccagcaagaggaatgatggatttctcccgagttcttggcaggaactgagctccactggttttattctgaagctgctaacagagagcctcccacccttgcccttatcactttttattcttctacatccttgaaattaatgagacaatgagttggttgtggtgaccgtttccaggcctgtggctgctaagctagcgtccaagtctggctgagaggtgggaggactacggccaggagatgttgggtttcactacatgatgcaatgctctaatttgctgaatcatagttcctaatttcctggaatccaagaaacatggccttgtttacccccgtttgtacttagattcaagggctggacatttaaagatcacctgtcagtcaatccgcctccttaaactaagatctccaaagcaagatgtgccattttgtaaaaacttctatccaagtttaacaggcagaaagaaaagtgaacatatcataaatgtaccacccagtgatttttcacaagccaagcacatcctgtaaccagcacccaaatcgagacgaacaccaccagccccttggaaaccaccggctatttcccttccagccaacgactttaccctccccaagatcccaaccatctagccagcagcatgattcatttttggactctaaataattggaatcacatcatattgactcttctgtgactggcttctttttctcaacttttatctttgcaagattcaaccatatttttgtgcttatagctcactcttttttcattgcggtatactatcactttgtgctactatactattatttattcattctaaaggtattgtttttatgctctaaatttctgggagaggagtttttgccacaccccaatacattcagactttgaatcataattttaaatcctcttttattattattattatctttgctgtctcctacatccaattattctaatgaacttctaatgatttcatggcttcatctcccttctcatcagattcatttacaaacatcacccaagagcacggatctgaccacatccctttccactgaaacttctcctgctgcagtcttctcacccaggcactcctcatcctccctggcttggtcctttcctgtatcttgcctaattcgctttgaaagcacaggatctactttttctttctgggactgcatcattatttccccagccctaggcatatgttgaagggtttcttcagtctagaagtttcttttccccccatatacagtgtcagacactgctaacccatccttgaagacccagttcatattatacagtcccagctctggtctccagtttgcctgtttcaaagtcggctctgtagggctctgccccttccgcttccccgtgagctagcaggcgtctgagggcctcgggtttgctcccagcctctctcacctttgcccccagatatttgctccgtgagaatagcctggatcttctctaacccatcgtttcttcttttattttcacatttcctgattacgttctgtctctttttccaggaaaaatgtctgtgggatggcatgcctttcgagggctgtgtgtcacagagagatgagtgaggaggagaaacctattctgatgcccagttcgagaggattctcatccagacttgttctcctctgaaagctctcactgactgtaccttcttagtgttgttctccaggtagaatgaggagaagagcgctgtgcacatgagtagctgaaatgcctttaaatcccatcacaatcctgcaagcttaatgtgctcagaggtggccaaagggaagaggaggaagcacagccactggagaggagagacagcacgagacaaggcaggctggctttgcatcctccttctattcatgcacagttgtcatggtctgacaattgcatcatcacatacaccgaaatgtcacaatgtccttattttctaaaattcttagtgcatagtgtgacacgaaaaaattcttctgattatgaatttatatgaaaagccttctaatggtagaacatttaatttacatctatacattcagtgattcacattttctgaaattaatataatcaagaaaaatcaggactgccctaaaaaatctgctctttgtctctgttactgattgtagagccgacctctcagatctgttgatgagatttctgcatgctttctttctacatgaccctgaaaaaattttttaatgggaactcctaaggagaaatcagagtttcagaagacatcagagttcagaagaaattagagtgaatgtgcttgaaatctagaaatttgctgagaacaatttcatgcagaggagagaaagaaaagactgaatccaggctagaaagttaaaaactggccagttatatcaataatatgtcagttctcagtccatcccttctcttggcatgtgacctcaagattgtcaccttaaaaaaataagttctacgaaagtaaaagtactcaagagttggctgggatttccattgcattttaaacagctcatttgtattctccttgtaccctaaaagaccagctcgaaagcagtgaagagcataaagcaagaggcagctggaaaaaaacaggtcttgaaatgataaatgtaatgtttcatgtcagcaactggaatttttttgtagcgttactgtcttggcctgctgacagcatgatttaatggcctggttgctccatgagttgacatggcaaccacagaaaatgccataaatatctgagtgtggacgtgaatgctatgtttacattgtgtgtggtgcattgtgtgacatgtggtggctgttgtctcttccagttggaaacgtctggaattgacagccatgttttagagccatttgggctaaaacaactctcatgacagacactttactgcaagtccagagctgtgcatttttgtgtatatttgagaaattaaactcagtgttcaatgggccagagggccttaacacagtttgccatgtaccataagccactttctacctcagagtcaagacaatgttgaatttcttctgttttcaacacggtagagaacaattatgttcattcaaaattgaatttagtgagcacttccctagatttactgaaacccaaattttagaattggaaatatttttgaaataacttctagtccaataattttattccttaggcaaagtaacaaaaaagaaaatggtttatttgtttcatgctccaagaccttgtaggaaagcaatgacatccatacttcccttgcttagatttttgcacattcaaagaaatgtgaaatcatgttttaaaaagaagaaaaagggaactgaaaactgattatattgtattgaccatcaattcccctgaagaccaccagaaaaatctacctatcaagcaaaactataacaaccaccatagtaagatagaacaccaccttgaaatgaaaattaggctggaaatgaaaattaaggtagggtataaataacaccctaggacctaggctgagtgatttttaagatgttcttttcatgtaggcaactggtttgaactgcatggagtttatggtattatagctttcaattagctggacacagcaaggccaggctaagaagtcagtctttctgagtaaatagtttgccttaataaatgaattgtttagctcatttatggtcttatttttcagaaaccggtatccctggaacatgcagctcagctacttttgcttgatcttggtattatttaacatacggacaggaaagaatgagtagtttcagtactgtttaacacagggtcaagacattatgttgacctcttttatcagtagcctcaggtaagtcatttactctctctggctcttgttagctcactcattcattcattttccctttcactaatcatattcattattgagtacagatgattcttgacttactatggcttgacttaaaattttttacctaacagtgagaaagcaatgcacattcagtagaaaccctagttcagtgaattctgaactgatcagaagatcagtgaattctgatcttttcccaggctagtaatataccatacaatactccctcatgaagctgtgcagtagcagtgagccatagctcccagtcagccatgatcacaagggtaaaaaattgggactctacagtatactgtgctgccagatgattttgcccaactgtgggctgatgtaagcgttatgaacaaatttaagataggctaggctaagctatgatactcactagattaggtatattaaatgcattttcaacttataaggggtttattggaaagtaaccccattataagtctgggagtgtctgtacttgctaaatgtgcccacttaggatacaaagataagacttgatagctgtcctcaagaaacctacaatatatactcttggtcatttaatgtgttaccattatgttagattcttaagtttcaaggagccaagatgtgcgtgggtaaccacaggagataacttttattataagtgctttccaggatggtagaaagcacaaaaagttatctcagcagccaaaagccaggaattatggagaccagaaacatttttgaccacaattcagggtattataggagctctggtgatcctaacaccactctggggggcccatctcctctccagagagaggagtcgattagctgattaatcacaatccagtgtggtgtaccacaacctacccaggttttcacacgaggccaactcatcgagcagctcacagacaatgctgtccctggatcagtggcaggatccagttgtgtgtcattggatgtattgctgagtcctgctacactcagctatggttcatgaaacaggtcccatggcaatgtatatgagaaagacctggggcatcttgctctgaaagcctcttgggaaagatggacccccaaagacccatgaactgcccagggtgaatatatgctaggcgatagaattataaaatattttaacatttcaattacgtgaagtttttctttttataaattgtctcattaagccttacttcctttactgaagcccagatcttcactagaatcaaacgcaactctctgtaccaaaattattgtatttcttttttaaaaaagtttttgtggtatgagattttactgtattcaaaacaattagggagaatatctaagtgaacaaacagaagcaaccagagaactgaaatggaaaattttttaaatcttagtctttcttttacttttctgttttttttttctttaatcttggttttgcagaagaagcaaaatattgtcagtgaagaagagacaaatttgtcacatcttaatttgatggtaaagaattgcctttaatcattgacctttctttctttgtcttgggatcaaattgtaactatggagcctgttttaacacgaagtctgagagaaaagggtttaacctcgctgaaggtaacaaacgttgtccttcccacgcccagtaggtattgatgtgtttggtttagagacccattcatcacagcactgtgagcagtcatcagtcacactaagatggggacttcacctcccagacttctaatttaccttgttcaaaactatgaatttgcattgaaaaaatgaaaatttctctgttgtttttggtatataacaaatggagactgtagcggtccgttcttgcactgctacaaagaaatatctgagactgggtactttgtaaagaaaagaggtttaattggctcacagttccacaggctatacaggaagaatgatgctggcatttggggaggcctcaggaaacttataatcatggcggaaggaaaggggtaagccagcacttcacctgggtggagcaggaggaagagagagagaggggaggtgctacacatttttaaacaaccagatcagccaggcacagtggctcaggcctgtaatcccagaactttggaaggctgaggtgggtggattacctgaggtcagaggttcgagaccagcctggtcaacatggtgaaaccccgtctctaatgaaaacacaaaaaattagccaggcgtggtggcagacacctgtaattccagctactcaggaggctgaggcaggagaattgcttgaacctgggaggtggaggttgcagtgggccaagatcgcacccctgcactccagcctgggcaacaagagcaaaactccctgtcaaacaaacaaacaaacaaaccaaaaaaaccccagatctcctgagaactcattatcgtgactacagctccaagcaggatgctgttaaaccatgagaaactgcctccatgatcaaatcacctcctaccaggccccagctccaacactggggattacaattagacatgagatttgggtgaggacatgagatcatttttaactttttggagctacagtgcatggaagactcttctgcagtttaaattgtttttgtactgtgggatatctttattgtgagagaccaagttttcaggtcactctgtggctgacttctatggctcctcaagtgacattgttattgaaagaataaaagtagattcacaaatgaaggggtcacaaatatagtacgcaagtggaaaaaagaaatgccgctagaaacaatgtcaccccagtagcaatgagtaaacctagcacccagatcttcatttctataccattctccaataaaaggaaccagggctttttggagacatggctgattctcaggctgcatcacaaaatatgcacaatgaacatggtacagcttgcagttccaggaagcaaggaagtgattggaaaaaaaaaaaaaaaggacacaatgatggagaaatgtcaaatggacaaaggaagcaatggaaagagctcccaatggccaaagctggaataattagaccaacaaaataaataaaacaatatgggactataacccagagtataaaataaatattcatgattccatattgatataaaaataataaaataaatgaataaatggggtaggagacaaaggtctctgcagaaattcccaaatcatttatgcacaaattctgccctccaggaggtaaagtataactccccgctcctgaagactagactgcatgtagtgactttcttccaaaaagcaaggtatgaaaagaggggaaaaggaaacttacagtggagaagccggacaaacaccacctcagccaggtaatcaaggtcaatgccaatagtcatgagtcatgctgatacaagctgaacattctctaatccaaatgctccaacatctgaaacattttgagtgccaacatggtgccacaagcagaaaattctacacctgacctcatgtggcagattgaagtcaaaacacagtcaaaactttgtttcatgcccaaaattattttaaaattttataaaattacctttaaactatgggtatatagtgtatatgaaacataaatacatttcctgttgagacttgggtctcactcccaagattatgtatatgcaaatatttctatatctgagcaaattcaaaatttgaaacacttctggtcttcagcatttcagataagggagagtcaacctgtagaatgtgcctttgatatgatgtgtaagaatggctctttacctctgtggtcttcctttcaaaaacccatcagctcaggataattatgagtaaaacattagacaaattccaagtgagggacattctacaaaattctccatcagcactcctcaaactatcaacgtcatcagaaacaaggaaagtcagaaactgtcacagccacgaggaacctagggagacttgaggactaaacatgcgtggtagcctggatgggatactgagacaggaaaatgacattaggtgaaaactaagaaaatcggaatgaaatatgaactttagttagtaataatgtattaatcctggttcattaattgtgataagtgtaccacattacgatgttaatgataggggaaactggatgtgggggatatatgggaactctctgtactacctttgaaatttttctgaaatttaaaactatgttaaaaggaaacattttaaaaatatgtgctaagacagacccccaaaatgccactttttaaaacaaatttatatgattcttctcacaattctccaccccttgagaactgaaatcagcatagttcccagtgtcttaaaacaacactggggccagtcatttttttgttccttattaaacaatgttggaaccaagcaaaaatcacttacctgcttgcttcaggaagacttgcttaccaaaaatgaggcagtaaatccactaaaatagctagcttataaaatccagtatctttcttatctagatttgcttcaggatccttggccttgcggggcttaccaattgagaattgttagggtagaaaccctgcccagtcccaagctactccccaccttgcaaaagctaccttagaagtcccccagtgcagaccctgactttgtcaacctgaggcactatcaagactctaccaaggtggttttctcttatactacagtaaatctaataaacttagttttgttccattaacatgtttttctggggtcttttgggaagttgacagtcaatagtaataggggttgaaacatgagaacttcatcttctcttttaagagtatcttggtatcttccaactagcgcaatctcatgtcagcttaagagccagttgaagaaaagttcaactcctatcagggcggtgtggtttctaatccttctactgctgcccatcatggtgctgtgagtgatttggtgcaggagaggaaggggcttccatactctggtttcctactcctctctgctgtgtggtggctccaggcttgcatctgctgacaaagtcccacacccgtgtctttcattaagccagctgagtggttctccctctctagcccaacggaatgtcctgagtaccagctttaactgccaatttggtctgtggctcagatattaaccttggctacagggtgtttaccctgaccacagttgatgtggcccaccaggcccagcagctggcacccatagctgcccgtcgtgtttgctgtgagcaggcaggccctcctgcaggccttccactccatccaacagccaaagtagttctggaggctgatggaggccttatttcagcctaatcaggccatcacgccattgtcaatcaactgtagcatcccttgtaaactcagggccaccctctgagtgctctcaaatcagcatttccagtttctggttttctcaacacctccccttgctcaagatttccatcctgatgaaggaggtcaagtcataggtccctgaacccctgcttccacttgccttactcttttccctccacaggggcctttctccagagacatgagacagtttccctttcatgcctgctcaggatttcctctgtctcatggtgtgctccttctggggtgaaagtcatggtatctgtggcagacatggagatgcaacctcagatctccaagaaaagatctgttacccagcttcgaggaggaaactcccctaggtctggcactgcttttgagccatgatactcttcttcggtggccctcaaacaatgagcaaaatattggaacaaggcagggccatctcctcccaacatgggaccactctatgggcggtctttgtggcagagctcctggttggtctctgggggctttctcggagcaatgctgtgctctaagagtccatctttttaatcctcccttctccccatcttgtcctgctagtcttagccccgcagcatggtctgaaggctctccctgtcaactcctgcttttttccactttgccatttgcagttgctcacaataaatctcttgctcttttaccttcttcttggcatctgcttcctggaggactcaaacagctcagttcctggtcagcagagctgtgatggtatatggccaaatgtgaacataatttatcaaagaacaggtaaaaaatccaccaggctcatattttcacattatatttacactcaagtgcatgtagttagccctcttgaaaaaaaaaagaatctatgctggctaccttccttgtacaggaaaatctgtttgtatgttatttatatttttcttcttagtaatttgagatatgttagaatctttaatgatttagaattttattgacaaaattaatgaccttgtgctaagtgaatctggatcacttacctctgaatgcagcactcacctttctccacctactcaggccttttaaactgcatcatcggcttcctttctggcttccagttaggctcagccaatggaaatcaccagcagaagatgtgaggtgagagagactgaagttggggaggtgctctttcctgctgtctccccgctgagccaccacggtgtctactgaagcccgcagcacctatcagtggatgctacttgctctgggctctggtggctccttccttccctggcccatcaggctcaggttcccgaacagctccccactgcaactggccctgggggactgcaccatcactcccagcacttcccagaccctgtacagagttgagtgtgcctgccagcgccctgagagactgaaacagaagccaaacacaatttttttcacttatccaaattcatgtagtacaaggtcattaattttgtcactcaaattctagatcattaggtttaaagattctaacatgtttcaaatactaaaaaataaaaatataaatactgtacaagaagattctatctctagaaatgtgttgagataactactgaaataaaaatctgcttgagctttattatggaattatttccaccagtttgccatgagaagcaatgtagaatctgtcaaaagcaataatcagtcatagctgagtttgttacaattcaacatactccatgaaagaaaaggtcccatctggatcaaaagtcttttgggattaatgaatgagattcttgtggttaataaaattgttttttgtccttgaacaagtatctccaccccgcaatgggattccaatttctcccatacattgaatggtgaaatgaacaaaatgattccagacagtgtttctgaaacttttttttaatggttcctttaggaaagctgtgatcttcctcttcagacacaatatgaatctgttcctattcataaaatagggatgtaatttcagagttttggaaaaacttgtatcccgtagtccttgagccttaaattataaaccctacatacaagcacacacacacagagacacacatacacagatacgcacacacataggtgcacatacaaatatacacaattcaacataggaagggagaactgctaaatctgaaggttagtcagggaaagcaagggacagaatatatacaaatatatctgtgtacgtgtgcacacatacacaaatgtcatttttaagtgaatttgggtttcagaaaatctgttcttactccacaggtttacggttggttaaattcagtcccaggttttcaaatgattcttaaattgttcaaatgcttacccaattcatagagataatatcaggaaatttgggggtttctaccagaatgtataaagtgtttctaagtcaaatattttgaactaaattcatgagctgaattcacttcattgtccaatgtccatactgtctcgtccatgtgctattgttttcacttgttgcaccaccactgacaaattgcccaagtcagaaatgtgagtggctttgatgatttctctttcttgtcgacaattcctaacaattatgtctcgaatgcatctcaggtgttcttcctccctctcttttcctggtcattgtccagtccttcaccgcactgtggagtgattcctcacttcctactccacttcatcctcacaccaccactacttatccttccaaaatgcgcagctgatctcatcatagtctactcagttcttggtaatttagctggctctttcttgatctcttccaggaagaaagcaacaaccctttaccacgggcctgaggaagcccttcatggctgggcttctgatcacctcttccatactcaccagtggcactaaatcactgttatttctcaacactgcatgactttctcaagcccccatgtctttgcatttcttctaccttctgtcttgactttcctccacttagacagagccttcttatccctgattctcagcctaaataccacgtcttcagaagccctcactgactatagcaggacaaactaatcactctctcttttctgctactgctgcatattttgctgctataataggtcgtattacaggatagggtagatgtttatctacacctctctgtttccccaggaaaggtgtgctccctgaggtgggaccagatatttaacctattctactgattcaacttttttcctggtgcctagcatatcgtggacatcccaaatatcctgattgaataaataaataaacgaatttccacatccctttctttaaaaagtaccaactccttaattactcttaaatgcactgtaaaaaaaaaaagaccaagtaatcttattgcattatcctttgagcatttttaacatctctatgaattaagttatgaatctcctgatgacagggccaaccagggaaaaattaagaagcgatgaaagttctgttctgttcagtctctaagcctctcctcaagctcacattcctttcagctgcagtgattgctacgtataaccagacatgcacacattcacacacatacacacacatgaagacacatatactcaggtacacacatacatgcatctatctgtgtacttacgatacatgcaattatacgtgcacgcacacttacacccagactacccacaggcaggcatgcagacacatatgtgaaagagggttaggaagtgctacatatgtacacaccaatggaatgcttagtttcctctacatgctaagctaactatttcacataaaatattaaattaaatatcacagtggccttggagataggcattatttcagatacagatgagtcatataggtaaactgagtcttaaaaccattggaaatcttgcccaaactgccatcacaggctggcactgggtttctttgttatatttcaaccttgaacccatagtccctccagtctaccattttctatttctgcacgccttccccttcacagcctctctctcctgcactctgggtagctgacacaagccaaagaccataggttcactttttggtgagaaataactagaaaaaatgatgacgagccagtcaaacagaacactggccttcagagcaggggtgaaaagacactttaaagcgagaatgtaagtctggaccactaccagggttatggcaagctggtatcagtgtattactataaaaaatgctaggctgatggttgagcactaggaatggagagtgctaacatttaatagatctgaagtttacttgcaaataagttccagaataattggaaaaatcaatgtatatatatatatttatatttcacacacacacatatatatattttacacgtcttcttcaaaaagtaaaaatactttgatctacatatgtgtgtacacatgcacatgagcacacacacagacacaaatatttccacttataagtactcccatattcatccccaaattaggttttacagaaaaaattggcctagttttctaataaactaaagtaaaaccttttctgctcttaaagatcaaatgcgagttacttttctgaagaccacaaactgttttcaactaaggcaaattagaagcacaaagcaactagattgttttactaacccactctaatgatgttaaaggatgtccacattttgttgacattacaaatttgtccataaatctaatgcgggacagagtaaccttcctgcagcaacaagagagacaaattctagaatgtgtttttctacttctaaagtaaataaataatgctaagcaaaaagcaaagcaaaaccaaaaacaaaactaggaccatggaagtaaatgcaaagtcaacttcgcgatttaggaaggtcaagctgtttgaagaatttaggaaatgtatttaagctgactgtaagtctggaatgctcagtcaggagttaataactgacagagcttgagatactcacaatggctctgtaagtttcctctagagccctccctccacaacagggcagcccaacttctcttgcacaccttccaatgtccatcaccagggatgaaagagtgggctggggaacatgtgagttactgaggtggaaaatggggagatagcataaggcagataataagaaaagatctaatgcattccctttattcccagaatttcagagttttgcccttagcctgacctgtcataagtatgcagagaatacattcatttctatgactgcagttttagtgagactcacaaaatataaaaagccctggactgggagtcaggaggccactgttccagctctgccttggcagggattaggcctgtagcagctctggttacacaatccacacatgttgcagtttctctctaagttgtgaacgaaatgattaaaacacccctaattggctttaaaagttttgctctctgatcttcctctcaccccttcccttggtggtaccatgaggaaagaactaaaactcatgtttcccttaattgtggatttcttcccatgttgtgcctaggagcagcataaccaaaaaaaaaaatcaagtgtctgttggggtgacaataaactcagcagcaaggatgatggtaagccttttacaattacagtgtctggagatagcagcatggagcgctaatgtcaagacaattgaaaagtcatcccctttcaagcagtaagactttcaaaatctttagtgattatgggtggctatcattccaaaggcttaagcacaattctgttattttaaacacaatacctcaaatctgaattatttaaaaataaaacttcaggaccattttaataaaagtttaataattatgcttttggtgtgtgttatggactgtacatttgtgctcccccaaattcatatactgaagccctaacccccaaagtaatggtattaggaggcagggcctttgggaggtcattaggtttagattaaatcatgaggcggggtcccatgatgacattaatggtcttattagaagaggaagagatgctggagctccatctctcttcacctggtggggacacagcaaaacggtggctgcctgcaagctcagataaggaccctcagcaggaactaaaggggccagcactttgttcttggacttcccagcccctagaactgtgagaaataaatgtctattgtttaggcctcctagtctgtggtattttttatatagcagcttaacaaaagcagtgtgttagtaaacattcttcagtgcttacaggaagcagcctctgcccatgctgaaaattaccatttcaaatgcaacctaaattagaacaactatgtcttttttttttttttgatggaatttcactcttgtggtgtgatcttggctcactgcaacatctgcctcccaggttcaagccattctcctgcctcagcttcctgagtagctgggattacaggttcctgccaccatcccagataatttgttgtatttttagtagagacagggtttcgtcatgttggcaagactggtctcaaactccagacctcaggtgatccaccggcctcggcctcccaaagtgctgggattacaggtgtgagccactgtgcctggcctagaacaactatgtcaaatggagaaaacaggctccagtgagcatcactggcatccctgtggagatgagtgcatatgctgagcatgtagatgtgacatctgcttggttattacagctcttaaatatctttagacagacgaggtaggccagtcattggcgtgtggacaaaggcccagtctctgcctcatcagtgcttgacctgtcctcactgaggcctgtgagaaaaatctcatgactacaacttgagtttgttttgtttgagtagttttagaaccaggtttaccttcttccaaattttatatatatatacatatatatgcatacacacacacataaatatgtgggtatgtatatttgtcaagttattctcaatgttatgaataaatatggatctctgctttaagatctcttattcaccccagctcaactattgctatgtaataaccaccccaagtttactgtaaaaccacacaaaccgtttattattattattgatcatgattctgcaagttgactaagtttagccgggcagttctcactcagggtctctcatgtaggaacagttggacagtgactggggctggtgttagctcacagaagactcaaacagctggcctccttgggcctccctgtctctatgtggtctccccatatggtctcttacctgggggctcaaatcttttgaagtgtgtgtcctaagagagagcaccaggtggaaactgtattgccttttacaatctagccttggaagtcatgcagcgccacttctgccccatcctactcattagaagtgagtcactaaacccagccctgttccatgggagggaagttgatgccacctcttgatgagaggagcaggtcttcagcacattgcttccttccggtcctccctccctttcttctttccatgggtcaccgatggtagaacaggaaaaagtctaggaggtaattgttttttcattctgtctccaaaatccctcaccatttctgtatttctacagaggaaaaacagaggccaagtaatttgaatcattcaacccatctctaatagtggagccagcagtagaactccagggctcttcaattttctatggaaagcaagagaattaaggggcccaacttattcctcccagtgttgtccagagggactggatcagaagctgatggattctttcctctggcttgccaggctggggctaggtgcccagctgtttgtgatattatggagagaatttatggatgggttgagtgttggacaagaacagtgttttctagatcatcattctccaagcctggcaataaggttctccctctgagatggagtttaacttgcaggatatttattcaggagaggctctgggaccaatatctgtggaagggagccacagtggatactactgggcattctgaagtggattgttccttcagagtagtcctgagtggggccaagctacagagcctatgtgcacatccatttatcagccactggatgacctgcccaaaggggcctgagcacgggctccaggtggctctccacagctgacccatttctgaaggggctgatagtgaaaactgtctgccagtgaaactcttagcagctgagatttattccttaaagtctttctttaaaggggggtctggacagcctcccatagtgatttgttgtgaatcacaaatgacaaggccctggcccccagagattctggttcagtggtctggggtcaggcctgagaattcatgtttcttaaaggctctaggtgactctgcacaaggggtttccgtcatatcagctggacgctctgaggctctccggagcagaatgaggtgctaaggtgttgtgtctaaacgcatggcttggtcaagtgtcccagtgcagtgatcctcagagggtcagatgcagcgaaagtgaaaatgagcatgtgggttatccagacaccccaagtttatcaccctgtctgggccagggtgcatgacgctcactcctgcaaaacagagtgagcaggcagggctgtttcttccccctgcagctgggaagccccagccagcctgctccattgaactttcagctcccggagttggctcattccctcccagagaaaacagccctattataaacatacaaacttgagttggggcgggggtcacaggctcttgcctaagtccatcctgcaaaattgacttttctgtcaatgagaacacagctctgcttttacctctcctgtgtgctttggcagtttctgcttggctgtaaaatttatccaaggaaaactggcatttatcttgggttcacttgtactcagcaaaactgataaacagatgggggctggccaggccacgggcaatttggttagcactttacaaaatacaaatgtcatcctttatttttacagggattatttattgtgaattaggaagttattggtctgttatattctaacaggatcattcactccagttaagggatccatgtccctattataaagtggtggggggtgtcctgggtggaagagactttctggcattgttggcaataaaggaataaaatggccctgctgggtttgcgtatgcacacacagggcacttatctgtgaagactgtgaaaaaagaaagaagcaaagaaagaaatcaacaagatttgatggggaagcttgcaaaggagatcagaattcagatcaaatgtcccaccccagtgtctctggagttttttttcttttgtgtcccagctaaaggcactgggaggatcagagacctcatcccagctctgtttactttgggaacaatcgttggtgtatgaataataatgcctccctctgaccatgactaattgaattgcagcctgcgggcagtggggaggggctttgccgggccagtccatcacggcgtttctcaagtagccaccgacagtgatggatgcagcggcgcttcccagagtgcatcctcgaacacctaagagcaggggtatgaacctgcattccgagtttctattagccggggcctggcagagaggacgggaatggcggcagttaaagatgagttggttgattaaaaggaagaggagaggcagcccttttcctaacctcctcctcccacacctgattttaagcaagttttgttcatggggacaaatgagaaaatattcatcgtgtgaccatgcaggcctcagtggggccacctctgctgaggccgtgcctgttaaaagtactgggcttgtttggggtgcagtgggaaccctggcttggaaaacaaaaaaggcaaaacagccaaagatttgtcctgttagaggatgtttagaagccaacaaatgaggtagaagaggagacagaaagacaagagagaagtaggggcagttggaaacggagtctatggccatgtctataatccaacaatggatcacacagggaccctaacatttggtcgtcctgttgtctgcgctgtgtttacacagcagaaccatgcagctggggccctgggctcagtcggactttgttctcacagcatgaaggtgacccctggtgaactgcgatccgggaagcttgtgcagcccagcagtctctatggtggtctggacacaggggaagtcgtccaattacagggtcactgctttctatctcagtcggatttagtccgggccaaaccccagattggcacctttttatgagagctgtgcacgccaccctggctccttttggtggcagaggctggctgaaactccaggcggattttggaggcagatgctggctttaagggagctttggttggcctgctcctcttggaaagccctgataaaagcattcggggcaggggctatacttctcttgtatctaaaatcctgaaattttaaatccctccaaacagtttcttataacttttttgttagcttactatgctttaaaaattatccataggtcttagtaccaacagtcattttactgcacagaagtttctcagctcccttctcttatttaagaatgagatactctctgcccattctgaactttacaggaataactcagggtgtcttgttcttataaataaaaaatttttaaaaaatcttctaatatgtttctattttatctatcaatccattgatctatatgtttatttatccatctgattatctatctatctatttatctatctatctatctatctatctatctatctatctatctatctatctaatctatctgctttcctacttatcttggtgaataaaataaagccaggaaagaaaggcaggtgtgttaagggagccgtctattcctctggcatgagtagggtgcaggatgtagtatcatgcagctggtattatgagctgttggaggcaatttcaaatcgatgcataaaaattatctccccagtatgtcctgaatcctaaccccacttgaccaaatgaacaataagacattcaagcaaaataagtagtttcctggtgcctgtaccaaatgtgaaatattttcaacccctcaaatccaggccgttatagcattttagtctctggttttcaacccccagcccaacctactaaacaaacattgtgaccaccctggcgtgggccacactcctggggttaagatattccacctaaaatcccttcagtctctttgagctgatattcatggacactattcttgtgctttgaatacaaaacaaagggagatggagctggcttagctgctgcaaaagtgaggggaaggaatggtaagaagatgcatttatgcctgcaatttgtctttagaaaataaatatttcaaacatttactcagaaaccaggttttactgtttgttatgaagcagcaggatttattaagagaaagcagaaatcagtgtaatttatggaaagatggctgaagacagcctatgtgggccctgaagctgaccaaattctaatagtcaccctccttgggttcagatgcatggaggaaagctgcgtcttgaaattgagggggctttgagtaggaccaccacatagtatcttcaccaccccaataaccctattataacttcgtgctttgaatctagatggcatctgtacatccccactcctgcattgcattgaaataaggcttgaaggagtatttaagaagaaattgatcaggatacagggtggagagtgctagggaggaaggtagggtgttccaagaagagggcagagagtaactcaaagagagaacaagaatcaaaggtatattcctattcctgcacagttgtcactggggccagcctgcaaagctgagagcaagactgatatccttctaccaactcttagtggtctagcagatgaaaccaagttagaaatagaacaatatttttctgtaaaagtgaattcttgttagttacttgagataacagtgaaagaatgacactttaatctctatgcttcctgtgggctatgctctaagcacttccaatcttccacgttcatgttaatcctcccaacaatcttggaagtggatgttatcatttccactttaggcaatcaaggcacagagaggtcaagtatatgccaggtggtctgtcctctaacaacccagggggctgtcctcaggactctggatgcaaccgtaacggggacacattgccctctgaccactgggatgggtgcctgaagtttctgaaaatattcctcaaacttgaaatacactcaaactagagagtatttagtggctagcagaatttgaatacagcaaaatggataaaaactttttttttaaaactaactagtaatattcaaatggtcatatccttttcacttagtaattctacttctgtgtgttccttctattgaaaaacatgcaattttgcaaagatctgttcaaccacagtcattgcagttttatatgagagagcaatgttccagactttcttgaaacaccacaaatgcccttccaaagaggatcgttgagataaactatttcatatgctagatatctgctaaaagtaccaagattcatgcacttagcctaaaatagaaaattctccatgatattttaagtgaataaagaaccatagagaaacatccccattttataaaataataatcacatagggctatccatggaaaacattctgaaagcaaattctccagtcagtcagttatggtcacctctggggttgggatcagggaaatatccactgtctatgctatactttattctgtaaatctttatttcttaatgaatatgtactgttaacagaaaaaaaaggaatgcaaaagttgttgcttagctcagaaaatacccagttgatcaccgctgtcatctagcaatcgtatttttaaaaaaccatgtgctgtgaggttatataagttaggttcttaatagaatttttcttattattcaagaggttaatcatacctgttaccatgtattctgacagctgtttctgagccctctttcccgctgctctaatgtctatattttagtaaagtctattttcaatatgagttccatatttctgacctattctctaaaatttgtttggaacccccacatcttcattcatgcctttttgcacccattcacagacatgcatagtgtggcaaaaatttgagtcatccaaagtacctattctcagatgaggtggaacaagctcccattctgccttcctgttttagctctcagactatatatgagtgttcttctgtagtccattcagtgacatgattttttttttacatttttgtgctttttaatggtaattttactattgaaaatggccctcaaacatggtgctgaagtactggctattgtccctaagcctgggaaagctgggatgcaccttacagagaaaacaagatgtgttagacaagctttcttcaaactgctgtttgctatgacttcatggtaaatgaatcaaccctatataggaaataaggtgtcttcttatttaagtaagtggaaacactcataatacaatgtatggatccattgtggaaatgttgtgaccagaggcttgcaggaacttaactctatatttcctttaggagcagtgggttgctaatacagtgtttgcagcaacttcatagaacataactagagtgaatgagggaaacggactgtactttagtctgggcggcatgatcacaagcagggagttcggagcttaagtcctaccccagtgcttttgtggccctgaccgtcacactccaggggtgctaagccagaatctaaacagccacaggctggccagtggtagctgctgagagtgctcctgctatctacacctccgccaatgccagaagctttgccaaacagcacactgggagtcagaggtgggattctgttgatgacgtcagtggtactcaagatacgagaaaatgtagagatggtcgacctccctggagggtctgttagcctagcaaagcccatttccatgctcttaggagtggttcccaaattaagctggtgtcaggcattcacagaaggatttctgggtgcctgggcaggctctcgggatgacagaagcccctggaacactgtcatgcctgcctcgagggctgcaccctgtggcacagagagaactgaggcatttctggccacaccacagccttggcaatctgtcttcccatcccccatgcaacagatctgaagttagtgaaataaaattaaaaaggcaaaaagtgtctttccaaaagtcctaagacctatgtaactagttaaccagaaaaagtctgggattactgttaagaagtaaagatgagtttgctgggatatatacagtacttttcacccactacccacatcctaatgtaacatcaatttacttttctctcccacaatagaagcatatgtattcatttagatacaaattatataaatgtatataaaattgctatcattcatatatttaaaatcaaataacccaatcttaactaattgcctaaaaagaaaaagaaaacttgttgctaaaggaaaattcaaattataattctcattaccgatgaatacttgagttggcatctaaattcagaaacttgcatggatttccaacgactctcagtggcttcatttgcctttcctctctagtctctgctaccactaatgaaaatcgagcctcttttcataaaaatcccatctgtccactcccactccggctcctgtttttggctcagtcagatcaacttggggtatggtggcagcctgtgggggaagctgtgatgtgctctctcatccgctttcaagggaggacatgttgctctggctgctggagggcccttcagggaagcctcagctgcctggagcccctggcctcaggtcatagcttcccacatccaacgactggtggccgtgaatgacctcaagcctggacatcttggccaactcagaatgaccttcaaggaccctcccagctccgagactagcgctagcttgtgccaatctttgccccattcatatttttacttatttttcttctcccattatttgcaaaaaaaccaaaagaaatattgaattttgaggatgataaagaacctaagtggcagtgattttcccctacctcttagaacgagtcacatgcactgaattcctggcagtgtctttcctgctctgtctttggaaagccagcaagtctccctgaggaagactatttccaataagggctgaatctccctttgttgaatatttggatcactgggccactacctgatatgacagagagtatatttgaatgaatgaattctttgggtctctttcttctaatttttttagaaatccatccactttactgacatgggaatagacagcaagtgcataccctgctctgtaagtaaagggcctcggctggaatttgcccagacagtgactctggtgcctgttccttttttctgacattttgtctgttttctccaatacttgattgaacaattagctttctttttttccccctctgatagctttcattttctattttggactgaaatatttttatattatcttttttatattgggctaaactttatgacagcttaacattttatcttagaattttttcacactttgaaataatttctgcatttatatttcacttaaattctacatttaaattttggtatcaattattttctactggattaattttccataacaacgtataaaatgtttataacacatttaaataaaactttatggatcatttatgataaacagttaatggttattacataatgatttgtgttttaataaaagtaattgtcaatgtaaactggagacccagcaatttcattctggtaccttaaaaacaatagactatatgaacatcaagcagaacattaaatattgccactatagcattactgataaggtttcttttttaaattttacacttaaaagtcctcatctctgagttcattgctcacagaatctatttagaagtacgggttattttagatgttattagattaacaagattgattgttgtgctaattctttaagttaaaagtaaagttattttacatccattgtcaggactgttgtaatatactgatttcacgagaccatgatatcttatggctgccttctagaaaaatgtcataacaaatatataattcacctgtcctgggagtcaagaatgttagaataaaaatacgtaaaaaatcaacatgcaaagttgttagtgatgtaaagtgttgaggcttggatgggacatctttgcttgggtcacagtttcagcaaccacacagtgcccggcacctgacaacccctcagtatcatcacagtgtcactgatcaaattatgaaagagtattcttttctttttttcccctcttttatttttagttggcatgtaataatcatacatacttatgggatagagaggtatacttcaatagatgtatgcaatgtgtaatgaccaaatcaaagtaattagtacatacatcacctcaaatatttcttattttttttgtgttaggaatatccaaaatcttctctttttaaaaatatataataaattactgttaatcacattccgcctacagtgctacataacactagaacccattcctcctagttagttgtaattttgtatcctttaaccaacctttccctattctcccctccccctgaaccttctcaggctataataacctcacttctatggagtgttctttactcacttgcaaaatatgacatgtttgcaagactgtgtggcacagagtaaacactcaataaaggttagtttcttttttgacttttcattggagaagaaattctccctcctaaattttcaaaactaacaaaattttaaaaagagggttttatatacatagaacaatacttgtttgacatatcctaataggtgggttaaaagccaaccattaatgggcaagatttgattctcaatcatttttttcattcatagaaaacacaagcttttgcaacctaaatgtccatcaatagatgaatgagtaaacaaaatgtggtatatatttacagtgaaatattatttagccttaaaaagaaaaaaattctgataaatatgttaagatgataattcctatgttatgtatttttactacaattaaaaattaaaataaaaaattgaccagaaagtgatagaatgtacccaaaatgttaataagaaaacaggagggtcaataaaacagagaacagttgaagcatagattaaaggttaaatagaacacttttcgtgtctctaaaactaaaaaaaaaaaaaaaaaaaaaaaaaatctcaagtattttctgcatacccacgaagtactagaccccaagggtatagcccactggtaagcaaacaatattgccatgtgaacggagcattgaatacggaaggacaatggtaacctccccaacaagtgcatggagagggagttttaaaaataaggaaggttactcagaggctatccttggctactatgattgatacaatcaataagccctgctccactctgccttaatctaacctaagtaaccccctcttttccaatgccatttagtatagaatttacaggaggtcgaagctggaagaaaactaagaaagtgtcaaaatatctagcacaggcccttctatctgtggataagggggctgagccccggagcagggaggcatttaccaacagcaacccaggcagaagcaaggcagaaacaaaaggcaaagcctgtgacttcctgtcccgtctaattcctgctactttccttcctttcctttctcagttcctcgagcttctccaagatcacacacctggtctttctctctgcctggagaagtttcttttaaaatgagaactttctcaacagtcataaagtttattgaatgcgtggatggatgatttaaatcgaacaactgtaacaggtgactgtttcttagaggttaggcataaaaatttccagataaattaataaacatgaattatctataaattttttgtaatgataaaattttttgtaaatgataaaaattagtctgaatggaaaaaaaaaatgtgttgttactgcaatttctcccagttttttatgctggtctgaagtcacagacaggccctatgaagcctcaggtctttccttgggtcctggggcccactctgtctgttgggcaacgcagaccagagtttctgggatttaacacccaattggagcagccctttgccaatgtcagataggagttggtggataaatgcccccactccttcactcctcaagtgggatagcttcgaagtatatgttccgtgctgcccctacaggccctgggtggaatgaggctcccaggacccacagtgataattttcatggtaacactccctgtactagccgtttcccttcctcatgcacctcccagtgcttcttggagccacctcccaaatggacaactggatttgaattctgatctcaggaaagcctggatgtgatatgtaacattctctcctcaaccagatccagataccattagcaatcattttcacagtggcttgtaaatttctcttgctaaaagcaaaagcaaccagaaatagtggatgcatatggacagataaagggagaacatctcaactctaagtttccagctgcttttattcaaacatctagtcccagggtttccttatttgaactggtttactcaacccacatatagacactgaaatccctgccaacccagtttgcatgacaatttcaggtctgtgtacactccataacttaactcccctgtaaaatttccacagggaaatcaacgtctgcctgtatatttatttgtttgttttttgaagtcaggtgggctgtctgtgtttatcaacttggtctggcttgcatatatattgcagataaggacaaatcaggatagtactcagaatgctttgtttttggatgctttctcgcttaatatttccacaatttgaagagaagcagagaagagagacaaagagagagaatcagtgttatggtggtggtggtggtggtggaatatgttattgaaattttcagcagatatttttacctttaaaaggaagctcattatcatataaggggaagaatatggtttcttttcttaaaacagaatgaaacatccatgcccttcatttcaaataatatgaaaggaatgaaatagtagagaagctataggttggattgcacactcaaaatagagtgaccaattcccatggcatcagactatgaagcggtctccaggatggggcccctcatgccacaaggcagatgcctgctgctcccctgtgccacagtggtggaaaggaaccaaaagtgtcagatactccggagtttttaaacttatgattgacacataataagtgtacgtatttatggggcatagtgcaaatactccagctcatcccccaatctgagctagataatgtgcccacataaagaaaatgaaatgattatgtcgtcatatgcttattcaataaatatactttctagtaaagaaaaaaaaatctgtgcaaatgaacgtgttaaaataggataggatgaactaaaacaataaagaaattaaaaatagcaattaaaaataggtatgttatattcaggtagcacagagacgagaggttaaatccacctagagaaactgagaaaggtttttggcaagagtctatcctgtgatgggttttgaaggatgaacagcagttggcaatgtggagaaggtggagaatggcatccaattcctgcccttcaacctaaaaatgacagaatagacagtgggtttttttgtttttaaacatataatagtattagaaaataaaagtggaaacctcagtgcatctgaagttttgaggaatcctagtaaagataaagtcatatgaaagtggggagtgctacccaaagcaaaggcagggggctttgttgcaagacagagaccaagctcctttttagggtcccaagctctgagggaccgacagaggggtgacaaagatttgcctgtggtcttatcttgagcacctgctcctgaacaagctggagattggtgatctgagtgtctgtgttgtggaacatgacttgccacagtttattcattttgggagtgatggtggctttggtctcatttgtcactagaaagacaccaaactctgggccacgtgtggtggctcacgcctgtaatcccagcactttgggaggccgagacgggtggatcacgaggtcaggagatccagaccatcctggctaacacggtgaaaccccatctctactaaaaaaataaaaaaataaaaaatagccaggcgtggtggtgggcgcctgtagtcccagctacttgggaggctgaggcaggagaatggcgagaaccctggaggtggagcttgcagtgagccgagaccgcgccactgcactccagcctgggcgacagagcgagactccatcaacaaacaaaaaaaaaaaaaaaagaaaaaagaaaaagaaagagagagagagacgaaagaaagaaagaaggaaagaaagaaagacaccaaactctgcagacagaatctgtaactgaaagctggctcatttatgagggtaaaattaacatattcagcaggacaagtgaagagatcacttctgtgacacaagagtgggctgttatggaaaagaaccaaacgcagactttaaaatgagaatccagctcttctatacagcagacgggctaaatagaagaacagatggaataaacgcaggaatgagtgagctgggagcatgagtcggaggaaagatgaacatagagaaggcataaaggaaagtttaaatgcggcaatggatccaaaagatgcaatttcctttaaaaggagacacaaaggaaagaatggaaaaaatagatctcgtggaaggcaaaagacggacaaaaagatagtgcaaaaagttcttccagagtttaacaaaaaagacacgaagtttcgaagttttatgagagtaaaacggtagggatgaaaatggaggaacactccattttgagggaaactgaaggacgctaagagtcaagagtaattcctaaaatcttctagaaagaaaaacagattgcctacagagaaagcaagaaactgaaaatgaggtagcaattgcatcagagttccagaattttctacctacttgacagtataattcaagggctaaacagtgaaccaaaaaagcagagacaaagaggggaaacaaaatggaacacaagaaatggtaaaaggaggaaggtctgtttattgtttccaaaagaactaataccaaggcagaactaaaatcctacagcagctctgacccatagaaaaataacgtgggccaaatttgtaatttcaaattttcaataacaactttaacaaagggaaatgaggcggggcgcggtggctcatgcctgtaatcccagcactttgggaggctgaggaggacggatagcctgaactcaggagtttgagaccagcctggccagcatggtgaaaccccgtctctactaaaatacaaaaacttagctgggcgtggtggcacttgcctgtagtcccaagtacttgggaggctaagacacgagaatcgcttgagctccggggacggaggttgcagtgagccaagatctcgccactgcacttcagtttgggctacagagtgagatcccgtcaataaaataaaataaaataaaataataaaataaaataaaataaaataaaatatttaatatattttatttaaaccaatatatctaaaatactatttcaagatataatcaatatttaaacaatgcaatttggcatgtattttacacttagagcacctctccattcagactaggcatatttgggatattcagtagccttctgtactggtcagcacttctagatgacctcaacaagtagtaggcatgggaagaagggaggaaaattaagttctactgatgtttccttgtttgtttcttttgttttgttttgtttttgcaccatcataactcactgcagcctcaacctcctgggttcaagccatcctcccacctcagcctcctgcatagccaagactataggtgttcgccaccaccatacccagctaatttttaaatttttttaaagatagggtctcactctgttgcctaggctagtctcaaactcctgggctcaagtgatctcccaccttggcctcacagagtgctgggattacaggcctgagtcaccatacctggcctgctgaggtcttacttgggagagaaaactaattccagacattgataaaaataacattatagtacgtttaaacacaatataaattattataagagtaatcactaaagaggcaagaggaaaaaaagaatattcactaaataatagaaattatatgtataatttccacaacactgcaaaaaatatataaaacgtaagagaacttgataaatccaataaaagcctgcatgtttccattgagcattgtaaaaagaaaactgaaaaatgagattatatgaatatgtccaaataaattagtaatcacacccaatatgaagggataaaattgacctattggaagtcaaaaataggatttttaaaaaaagaaaaaaagaatctgggcacatcttgttacatagacacacacacacacacacacacacacacatacacacacatgggcgagacaaaataaagagaaatgttgaaaataaatagaaaaaaatctgtgaaacatacactaaaagcaggttttactgatgccagataaataaatagcatttaaacaaaaagcctttagaaagcacgtaatagttcacactgataaaaggaacactgtatcaagaggatgtattactcatggaactttttaggttcaaataatataaaacaaaactatcaagaataataagaaatttctaattctaaaattataggtaagaaattttaacacttttttggaattcaacatcaaaatacgatattttaaagaaaactctatatattctcattcctgaatatttaatatgtatctaaaaaaggatgtcctcacaatgccatatgactctaaataaaattttaaaattccttgatattatctgctgtctgatgttttcagttttctctaattgttcatatatgccattttatagtttgtttgaatgaagatttttaagaggctactacttgtctatatttgttttatcttttaagtctcttttcacctgaaattgtccccttctcccctcctctttcctttctctcatgcaattgtcttgttgaagtcactgggcccatagaatgtcacagtctgggtttacctgcctgtgccccatggtgtcattgtacctgttcccacatccctgatacatccgaaaggctggagattggatgtaatgacctcattaaatacacatttctttattttttttaatttttgcaagaatgcatcataactgtgctgtgtatttcatattatatcacaccagaacttacctaatatgcagttgtgacacttttatgaatcctaatactgactaatgtgttcaagtgggagtttatgtttcaaggaatatgaagtctttgctgcttttgcgttttatgtatttttaagaaagaaaatggatatattttatcacatcaacatatgaagttttgtaatgacacatacccacccctaaataaagttaaaacaaaggacacactaggagaaaatgttttcaaaatgtaggacaaacaatctaagacataagtaactgcaaattagtaaaagaaagaaaaacaactaataaaaaagtaagcaaaggatgtaaacaggatattaacagacaagtggaaaataattgtcaataagagtatgaaaaaggctcagtttcaagaataatcacagagcaaatcaaaatactaagatactgtttttatcctgccatattggtaaatttgcattgtttgataatattcattcattttttgacaaatatttttgtgccctaagcttataccagccctaattctaagcatagctgagaacaaagtagattccctgtccttaagaaacttgcattactgagtaggaaatagtcaatacataaataaacaaacatgagaataacttaatttcagataatgacatttctataaataaataaatagcatctttcaatagactaaggtgggagtcagaagaactgtacagagaaggcatcccagagaggaaaggtggtggctaaggtgttgctagctatgtacattttgggaggtgggaatgagatggaggtaggtttgggtgggcagaacttttttaagagtgcagagctgggcaaagatccaaagacaggaagaatctgccattctggaggcataagaggccagtgtttccagagcactgagaacagtgcagtgtactttgtattacattatgtcagaatttgcctaatgcaacattttgaaaggtagaagtgaagttccaaaagtggaacaggacaagatcaggtaaggaccaagatggacattttaagattgtatttgacacaaaaagcagtgagaatccctgagaactctgaaatggaggagaggcatatcgaggtcttaagtttattctgggactgcatggaggaaggactgtgggtggaagaagaatggaaacacggagcccagttaggagttgaagaggggcaaatgggctctgaatgtattttggaggtagagcctcaggttttgctgatagactgggtgaatagggtgaaggaaaaggaggaatcaaagatggctgtcatgggtttgtccagataccctgggtggatggtggcaagattaaccaagataagggaaaaggatgggggggatcagagttccttggaggggtctggccatgactgctcactggtggggccactgaagacattggcaggggaggaaaataatcaaataggcatttttgaaggacggattggagaaaggcgatcctagggtgtgcttggatgtaagggtagaggctcctgccatagtccaagcagaaatagtgaggctcagaaccgaggcagagagaatggcggagaagggagaacagcttccagagatgggaataaaggcacgcttagaacacaatgttgacttggtggtgcggccagggaggaaagtaggtgcctgtcacaagggctcccaaatttgtcacctgagtaaagatgtgaaaagggtatcatccaacaaaacaaaacaaagttaaggaggatggagaacaaatgtctttctctcaacaaggctgtaggtcctcaagtattgggcccaggcccttctcttgtctggtatgtgatctgtggatagtcccacataaagtgagtggaattatcagattaaaacaacaacagtggtcacaacaataacaacactggaactattggatgattttctggtcatattttcattaacttgctacgatattccaacttgctatttgagaaacaagaaaaaagaaatttgatttattgggtgtgaggtggaggatgggagagtgagtagggtaggccaattgctttattattttgttcacaaacagtgattatgaaaataagggcaaaattgtaaagaactgttgggggctgtaggatgatgagcatagggttaggtgagctgctgaattggaagatagaggagatccctttactgagagcccattctcaacactggcttgaagacacttaggtgagtttcagtcagattaagcccagtcatttgttaataaattaaaataccaacattacaaagaatatgtattggatatttgtgagtacacacaaatacaaccaatattaacaagttgaatacaaccttatatttatttccaggatctgtgtctaattttcagtattaatatattactaaaagaatattttaatagacagatctattttgttctctacaattcttatccaaaactttctgcttggggaactacctaatttccttttattctaataagtagatgaatgagacttcacttaactataatttccctctattagctgttcatgacacgttgcttggtaatatttccaaaagtcatgcttacacaatgttgagtaccaactttagaaattattaatttaacaaatccaaataaataaacttccagtcaagaagaactgaagtgatttcataatatgcctaaatattgaccattgttcttcaactttgaggtgttttaatagcaaaataaggaaataccagccagggatgaaaatcccagcattctggccatcacatgttgtgacttgtgtaacagcacagatggacatgaagatggtgagccttgtaaggcccctcctctccctcacatcttagctgcaggaattttagtttcattatccagcaccaatgagtatcctttccctcttcgtatgctaagaacatttattccatgattgtctgtttccactctaatttgtattctgtctacacaaaaaatttgatgttacaatgcttagcgacataccacataactcagagtgaattctttcacacagtcccagagagagagggtcggccagatgccaaaacattgctagtgtggtggctttccttccgactggaggagatgtttaaatggtgttgtatcatttcttgaactacatttttgcctctgtgcctcctgggtatgagaggatttatagaccaacgtttttccatgttttcttcacatggattactttttttttttttttctgtaggactctccagctccttaaataggctgctgttcttttgattcactacttggagttagaggttatagcatttcccaaacctgttttacttgctttaacccaggatttcctgtgagcagtacctattttttttctgtaatacctgacatatctagtgaagcacacttttgccaacatgaaatgaatagccatgtctttaataagcatggctaactcaaagagaagatcatagtttttacacattttgccttctaaaatgtaagactgattcactaatcaattgattcgtcaatagagaaacagaaacaatctcttacaaagttatcactgcaagttcgctgatgctcatgattgaatctatctccagaaacaaagggagaatagaaagcagaatcattttccaaatggaggaaataggtgaacagagccctccaatatagtcaaactcaccttcttgtcacaataatgaaggctgtgttagaaaaggcaagttaataagaacacatattaaaaagaaattatccagaataacgcacttttggaacaatctcatctaactccaacttcaaagaggagggaactggagataaaagcaaacaaaactagcagatggcactcctgtgactagcaacaaagcaccttaatttcgaactcaatgttcttccaaggagaaaaatacaaagattatcctccttggtagtttaagtaaagctgacattggtttaaaaaacaaaaaaaggctttggtttcaagataaagcagtgaatctggctttaaaggcagcctaaagggtaaaggaggggaatgaatgactgtaaggcccataagatccggtcagcagtaaatgaaagggagggtgaggctactttagtggaagcaagaagacttagggggattgaattgcacacaaggcggtgaatatcccgaatgatggctaagtcttcatgatgccaccagacttacagatcatccagtaagtcattttactaacaacaattttgtaactactaaactatttaaccatgtgccctgtttctcatttcttctccagtgtgtgagtgagtatatacttagtttggcaaaagatttatttcccagctggaagtaaatcaggtccatattacactccaaaacccagtgtcatgttgattgtttatgccaattttgatccaggtgtttctcacttgttgatgtggagacagtgggaaagtgcatgctccttgtcaccatacagagctgtagttgtaattttagggctgcttgcaatactagtggtgaaagtcaataatttttggataaatatgatgactgagtccaagaaagcttaactatgtatgatgggagatatggtaagatgtttacacctcccagaccatgtgtgtgaaccaccataaatagtaaaaggagaagtcacaaagaaataaggatttgatttaactgtggtggatgtttgctttgttttgagtcagagtcactgttgctctgagatctgtaacagttcagtgagtgtccctctcttccaacctgcatccctttacttgagtactttgtctggtgctgacatctgttctgtccacaggtgctacaggctgaatgtcctgaggaattaatgcttctgggagcagcctttgaccagtccctgagagaattagcagataggcacatgagctcgttcgccccttggttgagataaatctgaggcacatgcttgatgctggctcctagaggtccccagcaggtttaagctctgcatgcccatggtggaaactggcctcatggcataaccttcccagactgccttcctctctcacttccccaacccctgactgctgtttcctggaatcactcccaaaataaacagcttgtgcttgaatcttcgatttgggtctgcttttagggaacccacacaagacaatatgacttgactcacatttctctccagcttggccctgagtaggattagtaacgacaggcagggatacatcatggacaccaggccattgtccagtgcttgctctctatgagtctttcgagttccagttgggtgagcgtgacccacttctgcagcccttccaactcagcacacacgctgccaggagcagagagcatcggggtaaacacgacattttcctcatgctcagcaagacaggaagtttattaaatctggtataaatctttgtctttaaagtgccagttggtgatttattttctccttctgtttagattttttagagcgtaggtgccaacctctggaatccaatccaaaaccccaagcgaagtcctgttgataaatcaacaaaagccctgtttgcacaacgcaagccaaatgcaaatccctcatccttgagagtgagtctaatgatcatttttcagtgttataaaaggtgccatatcaatgcatcttactaattctcaccttggcttctaagaaacctcctctggctgccttccttcaaagaaaatccacagataaataaaacctctcaaggaacaccataggtggtaaacacatctgaggggaaagaaaattgcttcaggatgcagttagcgggcatattccccactatctctcccttgtatttgggcagccagttcaaccgtgtgtgcttcttcatctgcaaaagggttttaacatggatctgatgcaggctctgagagcaatttaaatagcgtggctaagaccttgttaacctctccttgttatgagctgggactcaggcatgtggccgaatccatataaccctctatttccttaccctaggatggttgaaaggattaaatgcattcacttatttgttccttcacccaagaaatatatatttggcacctactctgtgccagaaacagactgggcttgggatacccaggtgaaccaaacagttgtggccaaaggaaagaaggttagtggcagtgaggcagtgaaaacaaagagacgaagacaaaaaactgaggctgacaacgtcggcatgagccaaaccataccaggcctcaaaggagcttggtgtttgtgctaagaactattggaaaccactaaagggcatgaagcaagagaatgagtggcatgagaagaaattaggaggcaagtggagaatggatgagctaagtgccaataacaaggtcaccagaccagtgtctggcacagcacaaatgttcaacaaatagaagttcttgccgctccccttgcacccatcccctcagaagccagagttattatcctgtccttaaccacctcctctaaggtaatattacctagtaactgttaagctattacctgcctccatgatccaattatccacttgggggcaaagatcatttcttctttgggaggaggaaattggaaattaagttttatgatctaaggtagaaaaggcttctgtttgacaagaatcattgtaaaattattgcacatttcatatcaacgtgtgtagctaactactatacaaaagaggttatgggattctagaaatgatatttatgatcaaaggcagctcaaatggttgggcaaacgtgaaagagatatacacagatataatataatcatgtgcccttaaaaacaagttggcaggttggctcagtcgatttttggtaaatagagtaagtatttaaaataacaagggcagctaattaggtatatatcctattcatgaaaatttgctattatgtaagacctatgagttgttgatcataagactttattttgaaaaacgttggaatatatatgtttataaagataaatgcatctaaacaattgtgtctggacaatgagatttcttttgtgctgtttaaaatacacaaaagatggacagagacagacacagaactatgtcgccatcaaagagtttcaaagaaaccaatgactaggtgttagttagatgctttcaaaaaactaaaatctaagaaccaccagatgggtttattttgctacatttagataaagacaaacaaagaagtgacaaacccattactggatatagatttaataatctatcaagaagagtgatttttaaattggaaatttgaaggagagattcaaaaatccagaattggtgaagggctaagaaattgtccaactttacaatggaaatggaaagatctggcagatgaaatcttagggttttacttgataagtaaaaagagaaaccaatcatgagaattgtcagaaggctaggaagaagcaaatgttgccatatcgttcaaagaattattaggctacattctggaaatgatgagaaaatttgtagttgatccctaagaaaattcaagaataaaatttcaatcatatgacttcagagctcttagaaaggaatgagcatcaggagtcaaaataagttcacaacaaacaaacccttccacatagttgttgatgttggttttcattgtgttaccaaagaggggggatcaggatcaggcaatagatccactgggtatatttctgggaaacatggacaacaaccaggaaaaagagaattgttccaggtacctctaaatcagaaacgtttattgccaaagtaaaatgaagatgaattcctcgctgtgttcagtcatgtttggtaatccatctgctttatattcaggtttttattctgggttttctttgagcatgggtggacaaatctatgtataaagcatttcctgcaaattaggccatgcacagtaaaaagttaacttgtgactttctagacaaatgccatttcatatcattactcctattgatatttatgctatcctttctagcatatgaacaataagttactatcattttctagacaaattaaagctttagtgacttgtagaaaagcgattgggtttggaattcgctaagcgataatcattccatcgccctagactagtaatgctgggcgaatgaagttaaaactccatgatgaacatggagaaaagcacccatccttttggaagagttttagcttggcaaggaaactggcaagttttgctttaatgtagatagtggtacctgcattctcaaccagagctccattccaacatggccccggagaagctctgtacagcggagccctcacatcatctgcactatatgtacacttggtcaggctgtgtaaactttgacatgtgggtgtcaatctttctcatatttgcagatggctttatcagagcgtgattagtttccagaacaaatttgagcaaaagaaaacattacctacagtatgtaagccaacagaccagctagttttcagatttgtctatttacatgggcactagatgttttgctaaggctctctaacactgatggtaattgaacagtgccagtgtgttagtggaagctgatgagttgtaaaggttttataaacaactagggtggatttggccacagcctttctagtaatgtttgttaatctccctgagcaagtgtgcacctaacacaatgtaaatactccagaatttggaggtgtcaatagtgtaacttttactgtttgtaaaatcattctttgatatcatcagtaagtttactgaatgtcccatggccaaatataataaaaccttaagtaagcgcttacagagaaataagggaaaacatgtgttttatttttaccccgctgcatgtttgttaaaggatcaccgtagactgataaatagagtcatgactgtgcctgtgtgtagatttccatctggatttcagttaaggctagttttactctatgctgaggaggaaaagtatctttacaattattagatggctagtttacctatttcactgagaaagacttaccttagaactttcagggaaaatctttactgatctcaaattatcagcaaattcaaaatttctttaagattaatttcaagtagaattgagggtgtgggtgtagctggtaaaatctgtgttcagaaattcttgtgcacacacctgtttttgggtgtggctgtgctttccaatgatgtcaaatcccattattcctcagctcccttgttaaccgctagagggcggatccatttccaagggtttcctgggcaagagggaaaatccttctgaacatcaaaagaaaaatagttaaaagttttctgttttttttctctttttccctttttttttctgtgaagagtctcatccccacccaccccctgcattgttgatgtctgtgaaaactttgggaatatgcagtgtcctagtgcatctgataagactacagccccggaggttaacaagcagcccctctggctgcagtattgatgcagaggaaatgaaatggcggtgacattttaaagaggaatttgtgaaccacagatatgagcatggctagcgcagcatagtggcacataaaatcaatacaaataacccgaaccttaataccttgatccagggaagagactagctttatcagacgccaggcggggagcggccggtgggccacctgcgctgggtgtgctattgacctactctggagaggcgttaagccaaccacaattaggaggatttcttttttagagatgccttttgctagagagaattttctggggaaatgtgtgtcataataaaaataatctttgaaacacctccttgcagcaaacttgatcataccacattgtcattgtcaaaactaagacactatattttttctccaaattttacaaattgtctctgctttatatacacacacacacatacacacacacacatatgtatctgtgaaaatcgtctgaagatgtactgccttccccttctatagtttctaaaggctgagaataaaacttctattttgtgagattacaattactgctcttactgttcactgcaagaggaaaaagtcattttctcttctttgtagcatgaaattcttattgtgcataactaagtttatgcagctagctaaaaaatcaatgggagctaagacctggcattataaaagggtgggactctattgattgcaatattaaattttccctctttgcataatttcatttaaaaaacaggctgaaaaaacctgtgatcaatttaatttggaaaatgtatttttgaagaatatcctttctgttttttgttttacttcttcttgagatgttatgacaaagagcgacttcatttttcaaaactatgaaaacccttaagcacaggtaacactgttttagattttataagatatgtggggtaaactcaggaaatagaggttggggggaggcacaatctttcccatgcacatctttttggcaattttccttgtgtgtagctcttgtcaggttttatttgcaaagaattagaaggccatgcaaacacaagacctatcagagtgtagattactcctgatgttggagtggaaaaccaagtatcctctgaaatcaatctcctgtttccagatagatgtatgagtaaccaagtgtcccccttgaataagaagcacagatttggctgaacagaaatagggcaatctttcaatagtgggagactaactctcacaaaacagaaaaaatagaaagaatttattttctttgtcatattcaatgcttgaatggaaagcaagtacctgccttctctaggtctgtgtgaagaagaggacaagatggtggatttctttccattattaatgattgacttttcaaaagagttacttctgtcttttaattctgtaggatgagggtgtctgtgcacaagaggtgtttgttgtgtagcactttgtctcgatgaactgtgatgtcatggaaaacccaacagcctctcctggtccacacacaggagtgtggcttggtcttagggccaaacacatcccagtcttggcctgaatttcggtttctccctgccctcacctgccttggacaagccaggtgcacgagtcctaatgctgaaagctctcaggagacaaaacccctccgttccgaaaacttccaagtcctgtgcaaatgcacgtatgaacccagggcttgagaaggtgaaagccacagtggcgtggaattgcatgtgtgagtgtgtgtacagagtaactctgtttgtttgtaggtccttagtagaagggtgtctaatgttgactttttgaggctaatattgtttgaattttctatcctgactctaagccaccttacagagggctctttttcccatgctgtttgtacactcattaccttttaaaatgtcttgaagtagtaaacagttcaacagttctcccttccatccacccattgtcaagaataatgggggccagactgccaagtgcagcgttagatgttgtcgcctgctgctggccctggccataaatatttggagctttggggcaatcattcgtacacactatgcagttcaacaaatccttcatgaaaacccagtcggttaccctgagaaaaatgtgtggcccaagacatatttatcggggtggatttctagtaatgtgattgacacaaggctcttgtttttttggttgataatttgttgtaaaggaagtaagagatggtgtaacatacaggctttctctgcatgtgtgtgaatgtgtatttgcatgggtgtttcctttcacttgaattgaactcctaaagaccacactgtatttttccttagtttgagcaacagagagagggttgtgactttcttctcagggtagaaagaaaatcatttaattttagccactttattcctggtctttgtgtatgaagaaatgaatccacatctctattcctttggcttaggacagggcacggggaggtggggtatgcttggaaaaggccagggaacagggggcgtatccatctgactccttgacattcttccagggagaatcctcctttgttccttcaggcaagtgagttagagaaggcttgtaattactacattgtcacgttaaattaaaagcaatgccctcctggtggcctgtcagcttaagaggcatccctctctttcagggctctgatgtggctcctgccaggcccttattgtgctggtgaaaaggccaagtgagtctcagcctattcccatccagagacattctggagtaggatcctggtacatttctgccttagggttgtgtgtgagtctgtgtgtgtattttaagtttgaaagcagactggcttggctcttatacaatctctactctgaagtacatctggcaaagacaccgtggctctttggaggctgttgattccacggtgaatagaacagggccagcatgccccgggatgaggcatgtcaaaggagcatccaaccgcagtctccaggaggaaggtaggagccaatgccatcactagggacccaatgccttctttgaaaattaccttccttgtggactaacgtgttttcaggagaaaaccattgcattataactaaaggctgcatagagaccttgtcagcctcagcctgagatgacagtattcagagcatatccttacctggacaaggactttggggttcagaacctagttttgaaagaactaacctcaaattcccatcttcaaatgtctctgagcaagaacttggacaagtcgcttgggccccgtgaatctccttgcaacctaccagagactattttctatgttatctgttgcagcgactgtcaatgagcttatatgagtgaagcgaattctaaattgccaagtaaataaagatttggtatttaggaaagagaacaggctatctagtgtgttacctgtgtttggaaggagttaaaaggaaaatgcttgatcaaggcaagaaacaaggttaaaagtactcaaggcttttttcccagaagttttatcgagtctcattagggagtctaacatagaagggtctccctctaagcagactaaactgctggcatttactgcaggttataaatagagaagcaaatctctaaaactagtttagggtcatggaaaggactactttcaatcaattcctcataaataatattaggaacataatttctaataagttactcttgcacattggtttctctgagaaacagacactgagatagaattgggagtgcagagtttattgggggataacagtgttaaagcaaaagggaggaaggaaaaagttggaagggtcattggaccacagtgcagacctggcaaagtctgtgtccaccacaatgggagctcagagaaaaggcgaccccttggaagaacccctcactgggcagaagttgcaaggatcttgtaccactgctgtgctctggcactggccaggggctgccctgtaagagctcacaagctgagatgtgtctggaggctgtgggctcatctgaatccttgcagctgaacagggaaccctcccttgaagaggaatttgtcatactgacaaacactcccctcctcatcctcatcccttccaccaatattcagaatgttaccagcagagactcaccgagatcaacacactctgttgatcaatcctgcttaggacttgatccactattacattttcactgtaggacgtgtaaaatgtacacaataaaatatttgttaataatcagatcagatgaatctggtaaactcttaaaaattgtcatgattctttcttatgacatgaaaattgtatagttgtagaatgcagagtttcctttgtgcactggctgccagaagtctgaaaactatggggaattttagcctgggcttttgataagtatgatccatgatgtcctttctctgcatgattctcaaactcttatttaaaccttttatttcttatactttatgtttagtctccataaatgctttttggaaatatagagagataaaatatagacatggatatggatctctattattccaggaatcagccagggaattgtgtttccacttgagcacccattctggctcagtcagttctgccttttgttttgcttttcctggtccccccactcccttacatagcctttgtcaggtggtgtctgcctccacatcctcatctttataccaactcactctatgaagcttaattcaagttgtgggtctatcaaaacacacagaaaaaatggccaggcccagtggttcatgtccgtaatcccagcactttggaggcaaaggatggcagatcacttgagcccaggagttgttcgagaccagcctgggccacatggcaagatctcatctctacaacaaatacaaaaattagcaggcataggagcaagcacctttagttccagctacttgagaggcttcggtgggaggacggcttgagcccgggaggtgggggttgcagtgagccaagattgtgccactgtactccagccttggggacagagccagatcctgtctcaaaaaacaaaaataaaaacaagcacatacacaaggaaaaacaaaaccctcttggcatcccctgtctgcagtctgtgacttgccattgtggctctcctgcagagatgttgcatcctactccagccatgccacatcaccacgcccaagcaatcccgcaggtaagtcacagaactgctctgaatgcgagtttctcatctgtggattcgagctgagcttcccttcctctcggtgtggctctgaatgaagcaggagcatgtgcagagcactgtgtacctgggtgacccttcatgcctcacgtcccatcttgagacatccacagtaactgtgggccacatgacagtataaagcacctatccaaagtctcctgggtgtttctagaggtcaggcacaggtaagtgttgttttctatctatgagcttcttgtaagatgaccaatgaggtttttccccacatttcctgcatctccattagtcttggcagtgctattaagcgtctaataagttactgcttttaatgatgactaaactccaaaggggttgtcattttatcacaatctttgggtggagtagaggggaaggcatgctgctcctagtcctcatgagtccaccccacttagctgttttaaagaaaacaaaaggccaggcacagtggttctcgcctgtaatcctggcactttggtaggctgagacgggaggattacttgctgacaggagtttgagaccagcctgcacagtggagcgagaccctgtctctacaaaagataaaagtaaaaaaattagccaggtgtggtggcgcacacctgtgatcccagctattcaggaggctgaggcaagaggatcccttgagcccacgatctcaaggctgcagtgatctcacaactgcactccagcctgggcaacagcatgagactctgtcttaaaaaacaaataaataaataaataataaagaaaaaaacagaattagcagatgtcaatgttatctcttgctttttttttttttttttaatttgcttaacctgcagaccaatactttggcagtctcagtgtttctcaggatggcacaaaaccccacataaaatacacagagcagccacttgctgagcccacagcctgaggcaaacagggttgccctgacctgcactgccagccttaggccacttctggggttctgttggggtgggcaggacagacatgcaggtggagggaaggagccatggtaaggtaaatcccagggcttggataatgtgggcttctcagcaaatcaaccatgtcacatgacacaggtagtaatgatatttgattaagcataggaagtatggtgagtgtagctcatttttgatattctgatgtcattatttcaagtattagttgtgattttatgggtcctaagaatttaacaacaacaaaaagcaagctttggcaaaagtgttgtgccatattttacactaacttttcaacaaataacacatactatattgctcttcacctcttaaaagcaaaattaaaaccagtatagcctggctgtttgaggacccttcttttccatgcaacttaatgtccctggagctaggtgactgggaagcattccctgtcctcttttcatggcagagatgatagaggagtgcaagatagtgtactggctccctacccaccagagagagactcagccatctgtactactagcttcgctgagtggcaaacacctgaactggaggacttgcttctaaagaggaaatgctcacctttatattcagcaaataggtatgcatacctcaagaggccttgctggaagatttcatcacaatttgtggatggtaacaaagagaaatccccaactcactggtcctcacttttccctctaccctccctgcatccttctgacccagccaaaacatttcctctgaaaagttacatgcctgttccaaagacagatcctgttgctccttgaagtattccaagccaggcttgcaccccagggagtgacaaacagacccactggggcatgggaagaaaatattaaatcctaaatttataagtatttttatctcactatgtaaaaaataacgtttgtgtgtttcataatattcatgatataataatatacttgtatgtataaaataaatacatgtacctatgttacggtacatgctcctcttgaaacttatatagagtacttaacaaaaaccactggagataaccaccttgcagaagacctcctccagatacaaatttccattactcactcacgcacatactcaggtattctgaaatttgaactttggaaagaggcaaatagtactgctgctctgcaaagtacaaggtaatctgaaattgccagcttgatgtaatcaaggctgactttcacttggctttgtgtgcatttgagtttctccctacttctgctttacctgcacaaataacaccagtctggatgcaatagggatattggcttcactatcaaggaatgtgtctcacttttaattgaatatcttattcaggaatgtacaccatatgctctgttgcctaccagctgaactgaagaaatcacaacaaaatctaatgtcaattgtcttatagcctcttgagcacaggtcaaatcacattacaattggtcgtccacatttaggggttctgcaaccacggattcaactaatctccgatcaaaagtattcaccatcccccataaaagttaattgcagctctactgaatatgtacggacttctttcttatcattattgcctaaacaatacaactatttaaataccatttacattgtattagatattataaacaagctagaaataatttaaagtatacaggaggatggacataggttatatgcaaatactatgtcattttctatcaggggcttgagcatctatgaatttttgtgtccaaggtgggtcctagaaccaatgccccgtggataccgagggacgaatgtaaatcttcatctcatactccagggaaattcaaaatcctcctgacattttcattgattactaaagggattatattctcaaaggaaactatgtctccaggctccaacttctatttgtttccaaatttcatcccaatattgtggcacgtctcctttgtctgtgcccatattttgtaacccactgacacaaagcacttggtaatgaattagacttcagtaactatttgggcttcatacagaggagtcacactgtgcccaacaccaagcactttaaaaggttatgtgagctgctcttcatctggtatcatgattcccatggctgggtacctcatgcagccagctttctgctatcttattagttcatttcttctcctcttgcatatcaacctggaaatctgacttatcctattacaacaagaaatccaatagcttccagctctaaacttgcatacaccttcaagtttgtcagaccagaactggcagaatttccatcttatccagtgagtctaatagaaggcagttgtggaatacatgatgatttttcctctgatgtgggcagaggacagaggcaatcacagtacttgacttaaaaactcttcatgctttcagacccacctcagataccaaaaattcgtagataaaatatgccccattctacaccaccaccaagctgagttagacaacatacaaattcaggagtggaggggagttgttttaaaaaacaatttgatatttgatatttgatagtgtttaaagacaccatggatgcttcctggtcctgtggagtggagctggacacctgggtcttattatacaagggactctggatttggaaacccccactcctgcactgccagggccaatggaagcccagtggagtgtacgaccacattatgcatgtgagcagcagggcaggggatgaagtagtctctgctgatgtccatgcaatccaccccacccttctgctctccccatacaggtctccttcccacgccactttctctttacctctgaagctggcctgtccttccatgccctcctccggtttcccatccacctttaacacacagcttagggcagtttcttctgcaaatccaccatactgatggctgtttgtagtccccagtagacattctctacaggagtcaaacgagaattcacaagaaaggatgtaaagctatgctttgaaatgagagtgaagcaccattctctgacatgcttacagcaggtttcttctcaatggcagatttatgggggattttattgattctattttcatccatctgtattttctacaagaaaagatttttgcaagaacaatatttttcttaacagaaaagaaaatgaaacagtaagttatcttaaaagtgagggcatgctctgtgcaggatctagattttatgcaaaaaaaacccctaaaaaataaaaaataaaaataaagcaagagtgcttgcagaggttccaggacaggcttcccgcatgcacaagctggaggcatgctgacctgcttttcagccggcatagggtgtttaaaaattgaatgagtcatcagcatttagaaatcaagatacttggcacatatatcgggcacctcctgtgaaatctgtccacccagcccacaccaattcaactcccaagtcccaggcctgggtccacctcaatgagcttggggtgctctgtccacaggacacggtctccactactccccactgtgctgtctatactgtcacctggagttggaagcattttgttatctaactgtgggtatcaggcaccaacttcctcctttgcctccttaggacaaggaccacatggcccctgtgagatgttctccgtgggaagcatgaagttcacagtgcacctgctaggtttggcggcctgcaagcggccagaggctgtttgctgggaggagctcactcatgccagtgagagatgaactgagggaaatgagttttaccagatcctggaagagaaaggagcagggcccggtgggtgggcccactcatttcaataagaatccaacgtctcagtgcttatcaaaagcaaaccaagcctgcaggcccttttcaggtttatggatctccagtccacatccaggacctttcctcaggattaaatgaaacttaaacctgctaaataaacacaggcacaaaataatcattgagagtcattcactgagcatcaatcatcgcagccagagtgtttctcgtcttgacagcttactgtagggagggatccctgagtgctcaggaacaaaggtgaggggagggaggagaatatagcaacagagaggaagatctttatacagcaagctcaggaagaaaattaaatgaagaaatacagttatcaacagaaagagaaatccaaaattgggtgagaggtttttgtggtagaggttacaatgggctcttctttctccttttaatccaaagtaataaaatgctccattttactgagttctctctgtggcaaatactgtgctgaacacttcattcatttatttattattcattcatctacttattcacttactcctgtgtccattcattcattcgttcagcaatgtatctcaggtgctggcaatgcaatgaacaaggcaagggccctgctaaatgaaggagacacatgaatatatgattttagagagtaatgcatgatatagagaaaataaaacccaggaaggggagggaggctgggagtaagaagttctcctaagtcagcagctcagaggaggccaccccaaggagcaggctctggaactgagacctaaaagcagatgccattatcaaaggcccctgggcaggatgctgcagagaaaagaagggcaagtgcaaaggccctgctgtggacctggtttggcagagctgaaagcaggcaggaggaccacatgctgacctgcacgtggagttctgcctatgtgaatctggcaagcagcagcatctggtggtcagggatgccaaattgggctgacccaatctgaacccagggtactgctgcattccagacccaaagaagctgcttttcttaagccaagtccctgtggctcctagaaatcctatcagtttttccatggatttgacagatatacatattcacacacacatgcacacacgcacacacacacatgcacagacacacacacacatatatggagacagattcaaatgtactgaaggggagatgctgaagaacctgagttctcacctgaactcagtcacagattattccccaggggcctaagcaaacttggaatggagaaaccacctcccaggagacaacagaacagcgcccagctctgcaaggcaggtttcgttccactctccgcttttgccctcctgactcagtgtccaagctctctaagcccatggtctccaggctgcctcttctaccaggaatggctgtggtacttgtcccctaactccctgcaggagatgctgtgcgtgtcctgggagagcaagtggctattcctgtgtgtgcttatgtgacactgtccaattccaagcacctttaagactctcatcttcagagctcagggctactcttgaggcagggctgagaataatctccattagccactgataggagctgatggataaacaccccacctccttctcctctggcagatgtcttggaggcatgccatgcctactggggactctccgagaggtccccattagcactgagcccagttttccacagtggtaacccgatgatgacaaacccttcatggctgcctcctcttcctttcctgtgtcacttccccaccctccctggtgcatcctgggactacctcccacataaacttctggtccttgtttcagagtttcctttcagggacactaaacccaaagcgctgcctaaggtgctaactgacaatcaatcttcaggactcagcttagaagtcacctcttcctgcacactttctttgatctcctttcaccaacaccaatgtttggatcaggagtcttttctgcaggctctcttaccacacagaaggtgaccagtgttgttcattaacaaatgacgtgtccctcggtaacaatcaaatgcagggagtgagatgtgaagccaccatgcggtccccacacagctttctacagaagcatctctccagatccaatctgccctggcctcacctctgattaggactgggtcccctttggaggtcacactgattgattagtgctctctggggacagttctattgacaatgtggctcttctcagaaaagcacagcaaaaacaacctttcagattgaggccagcttccattgctcaatgttagatatttttcctggaaatatctgttggagaagggatattaactaccaataaaagtcatttctcaaaccacagtggacacatggacccaagcacacaatggactgtgaactccaacctttgaaagtcaagcctctgcttcagcatttggccctgtccatgatgaaattatttcctttcccccaggaacttgaactggtaaagtgacctccatgtttaacgtatccaggcaaaaaaggcactaagtctctataattcaaagatcaaaagtacctaaaatagatcttcattggtttgaacttgaaggaattttacctccaaactcagattaatttcttggcctgaacccaaagtaaatgggcttgtcttctttgcattttaaggtaaatgtctcttgcatatctgcaatagttcagggtagcaaatagctgataagccactgagaggttcattagtcattttcagaaggtggctccagcaggaggtccatgggctgagcagtgcaggcaagcacaccggaactgaagctacctgaacagagagtgtgtttcccagaaacaaactggaacaagaaaaaaatactccacagtgaaaggtgaagcatggtttctgggatctttggaaaaagaaagattccttgaaagccatatggctcaggaccattggaaaaagcgctttgagggcttggctaaaggtggaaggggctgagattctaggtggacagcaaactggaaaagccattggccaaacccctcgatgagcagtgactccctgagcttctcatgcagatgcagaggtgaaatcaagccaagagggccctgatggtgacatgcttcacttgtgttctctggcacatagatgcatgaaatggggcaccagtgctgggtttgggatagctgggctgcttatgaatattttttcctttagcttctttgtgctgcttcacacaaacctcaatagtggggctggtagttgagtgcaaagccccggtggacacacacatctacacacagccacaaaggttacgaaacaatagtccacagacaggaaggagaggaactgtaaataaagggaatgggaatatggtacgtttccccattgtgtgaagcagggtcggggcaaaagctggagactgttgtaaaaaagagtcctgggcaggtgctcagaggacagctgtctcgcacaaagaaacctcttattaaagccactgtgttcactgtataattgtatttacctgtagtgtcttctgggcattactcatttgcttcattattgcccagctgaacattttattttccatgatggggagttgattcttccctctgtccctgctgagcatcgatatgttctttcagaattgggaggtatcaggccaaaggtgcagttaccaggttgggttctagaagactttgccctgacattgtataaattattcagtaaatgaggcgacaaggccattgaagcttgggctctttcctgtctgactccccatctcattctagtcaatagcacacctagcagaattcacgtttggaatggcctttgcttctgacagggagagagccagcaaaactgttggtagaggggatcttcgggtttcatggcacctaccccttaaaaacatttaggggaatgtgtaggggagagagatctagatctgggaggcttctggaaatgtcgggtgggagttctggaagggctgtgctgtgcccgctgaggcccatgttcggcactctgatacagaaaagatgattctcttttaaataatcacaatggaataaaccctttatttaataagaacattttacaagcatagaaatatgacatgttttctggaagtcccattgcaattcacctccaagaaactatcacttggctggttgcagtggctcatgcctgtaagtaatcccagaactttgggaggccaaggcaggcggatcacttgaggccaagagttcaagaccagcttgatcaacacgatgaaaccccatctctactaaaaaatacaaaaattagctgagcgtggggttgcatacctgtaatcccagctacttggaaggctgaggcaggagaatcgcttgaacccgggaggtggatctgagatcgtgccattgtactccagcctgggcaacagagtgagattctgtctcaggaaaaaaaaaaaaaaaaaaggaaaaaaaaaaaaagaaactatcacttactggggtttggtatggcatcaaaaaagaatatccacagctgatttgaaaacactatttaaaaatttcctttttcaacaacaatcagtatagttttcttcctatacttcaaccacaataatataatacaaacagatgaactcggaagcagatacgaaaatctggttgtctttttaagcgtgaaattaaagagatctgcaaaaatgtaaaaaacatcactcttctccagaattgtttttgttttgaaaaatagttatttttatttaaaaacatgttattcatgttagcatttaactggttgattattatttcaagattaataaatgcatatttttatatttcctcaattttgatttctaatatggtaaatataaatagattttgcccacatacgtaaaagctctctggggacttcagtaatttttaagaacgtaaaaagcctcaagaccaaagaatttgaggactccgaaattcaagtactcacccaacttagctttagagtgaagggtggaacctttggcctaccaagatctatttgtcagttccaatcagagaaatgtcaaaatcttgaaggatatatttaaggagtccagaaaggttttccataccagcctatcagtaaagctcagagcttagttccttcctgaaatcttgtccaccggctcagccaagtctgcagagtggggtgaaagcttagtcttaataaacattcatctaagcagccccttctctttttaagcaaggggcttctgagattaggtgttcgcatcagaaaggggcgggcacatgtgacaccctgaggacatctgtctcatacaaggtttctctaatactcacaagcaaatgagagctgcccaaaggagcagacagaaagcaagtcaaacagcccctagccctgctctgcaggaatagtgcagaactgatccatggcaggatctgcagcttggatgctatctttcaatttcccccagggtgggtcagttggagctggaggatgtgctggcgagatgccccacccatcgcaccgtcaggccctgcgaggaggagcactccatctgtttgctcattgaggaagactagggtgggatgtattacaaccaccactcctactgattctcaaattggaagaccagagcttgcaacacatctatcatctccaagacctgttgctgttgcttcctagagtaagagaaagtttcctagatacagttttctatgtctaattcagacaaagggcagaggccctgagaggcctccaactgcagaagacatgcttaaacttggaaattccaggccgttaataatcacaacctgaaaacacagcattgtcagcggtggctgttggagttggtcaacttcgctaagaggcattcagtttctcaactcggtaatgctaagaagctacttcccttaggcaatcttgctgattttggtgaatcttacaacactcatttggaaaattgctaaaaatgactatgttgaatagaagatggcactcgccttcccttgtgatttctacagaatatcctgaaattgcttttgcgtcagataatacacatctttatttatagtgctgtgctgctttaaatcgcaaccaaagcctgcataatacttacctacataatattttattacattttaggtttgcatgtttagaaagcatttaaattttatgaaaaacaatacagatagtttcctgattgtaaggaaaatagaaaaatgataaaaagccatctttatctttcatgagaagacaccaagcctgggtatgtgttcagttatatctcctagagttaccatgatgcttcaccatcacaccttttaaaacaaattagtcatgcatttatttatttgttcaacaaaattcaaagtatcttctaagcaatggagttgaagaacttgaaagaatattgtaaaatgtaaatcatgaaaaatatgacagaagaaaatcagtcactttataaatacaagttggcattatgtaactatttttatttaatgtgtttaacttttacagatgatgttttttagaaaaagatttagtaatttgctcaaagtcacacttaattttttcaagcatcagaaaccaaacaaaacaaaaagaaagaaacatgcctccctcagttttggtccaaaaataggtatttcataaatatttgttcctttttttctctgaattcagatcctggtcgtctttccctaaatttccttttttcttttgtcgtggttatatagaattgaatatttataatgaaatagacctgctgactgggtcacagtgataaaagatgctgaatgcttctggttccaagtagttgcagttgatgaatgaatcccaggtcctagcaactgtgcttaaagggatacacctgcttacaggtggttaaggggagatctatttctatacatgggactgccataaatcagaaggagatcaaaacatttaaagccaaccaagcaggcaacattttttgagtaattgaggcttgttttagaaaacaaaaaatgtctgtgttagtccttgtctgtcaaacattattctctgtttgattaagctatacaaacagcaggactctgatgtaagcaagattttttctttttgtatgctgtacataaatgtctttaatcttttgagttaggaatttattggtggagtcttcatgagtaaatccagcaaatctctgaaataattttccctccaaaaggaaatagagcagggaggaggcagagaagggtcagtgaaactcaacccaaaaacaaaacaaaacacattttcctggaacaacaaagtaggtaagagtccagctgacttttagccagcttaagtctggggtctgggtgaatgtgccttgggtcaggtgacgataaagggacttcagaccaacttaccagctgcaaatgaaagttctttcttgggatttcaacaataaaccaaacaaacccacagcaccatccccaagtctgctattccaactccaggaaaagattccacacagaaggtctgcagaagacagttggacctggaatggttcttcttattttaacaaaaagagtgaaatgtggatgcttaaaatacacaaaaggtttgaatcttgactcctgtgagtcttgacatttgcattttattctgggaattttcaaaggataactgtgagtcgttaatcaaaggacttttagacattgggtgcatttgtttgccatggctgtgtaacaaattctacaaactgggtgggttaaagcacgaaaattttatgtctcacagtttcagaggctgaagtctgagatgtaggtgttgcagggtgggttccttctaagaacccactccatgcctccccccagcttctggtgttttgctggcaatctcggactttcctgggcttgtagacccatcagcccggcctctgcccacggttgcacatggcgtcctccctgcatgttgtcaccttggagtgggcctaccctattccattatgacatcatcttaagtaaacacatctgcaacgacataaggtcctctttccacataaggtcacattctgaggtaccagggttatgccttcaacatttagaagtggagtggggcacagttcagcccacaaccatgggtgtggtagtgtgtttgtatgtgtgcgcagccaccctcaccctttctccaccccgcctcctcagagatgccacacccacttctcagactccactcttctctcccaggaagcctgctagcacccagcccgccccaccccacagacaaacacacacaccagatacacaccacacacacacatctccaccacagcacacccgtgcacacatgcatcacactacacacacatcactaatactacacacacaacctgcacaacacatgcacaccacactaccacatacataccatacacaccaccacacacacatacaccaccacacacataccatatacaccaccacacacaccaccacacacatgcagaaacacataccaagctcccttctatgtgttttcgtagtgttttaattatagctctattgtaagtcaccaaattaaacgtttattatagttatttatatttcctgccaacttcttctaatttggtcatttaagcagctgctatgtctggttaatttttgtttcccacaaacaaatcggtgtcacatgcacagtagtctcaatgaacattaggtgaattaaaccgattacaatgaaatgagcgttaatctaacaggcacagaaaagagaatgagtaactgcacggcagtgggagcgtcaaggccaggttgggggtggtgagctgcgcgttttctcccaaactccatgatgacagtggctcggcacctcaccccctgtgcatagggattgtagtgtaagcctagcttcagagccattgcagcaggatgtaaggtcccctctgatgacagcattaaaggaccctgacccgtagggggagttcacccacactgaggagaggccggggccacactgctaagggccaggcaagacagaccaaggacttgaattccacaggaagggcacggggaaccactacacgtcttcccgcgagctgaggtacaatatgactgaagctgcactttaataatggaccattaggcaaatttatgtgcaaaaatctccacattttgcaaacaaggcaggtatgcgttgtctggttcatcggaaattccatgcacaacttgatgcgctcacaaattcgcaattcagaattaattggttttaggccatgcatttaggtcagatcacccagacattccatttcatgtggtgaaaagaaattaagtcaattttccccccgccagaccctcggctctcatctcgcaggcctggcgtgcgtccctctgctcgcacggggaggaagacaacctttaaaggcattctcattatttctcagggagatgtcattaagtactgtaaacatgtcctgaatgagtccgtgtcacaaagacggcaaagtgtttatagaataaaaacctataagcaccaaaatgagataaaatgggggagggggagagaaagagggaaagagagattttttttaaaaaaaaaaaggaaaaggaaatgtcttcctgaccaagttcagctaaggtgtggactatgtggtaaatttgccctaatgagctttaactacaaaagaaagcagggatggaacctacctggtccatgggcccaactctctgttcccaggaccctggcagacatcactgactcatcacgcccatctcccttctgaattcaccccaactgcccctgtgaattcacacctggcagacatcactaatcaatcacactcatcgccttctctaaagtcacagctggaagacatcactaatcagtcatgcccatctcccctctgaatttgccccaacttcctctaaaaattcacacctggaagacatcactagtcaatctcactcatcttctctaaagtcacaactagcagacatcattaatcaatcatgcccatctctccctctgaattcacacctggcctcagaattcttgcaaggaagcagtctaatcagccattctaagttgcagttcaaactgatggatatttctgttgaggggaggctccaggtgtttctttcctaagcctatgctactgcactataacaagaagaattattgcccaagaataaatgaacacactgtcttacttgaacattttcctatttgttagtttactttgcattgttgtttacaatcaagttcaggagaaagacactcagaagtctgcattgattttaatcccccggagcctgacaatgtgtgagcacacaggctggagatgtctggaatacctggtgcatggaattaaagttcatcagtgtgttcctttccaaagaggaatgatagcattaaggctctcctttggggctctgcccttggccaccagaagcctttgccctcctcatgcagatggcagaagtgcctgaaagtttataccccacctggggcaagccatagacagtgattggcagtgtggggtatgaaagcacagccaccttgcttgcagtgggacaagtaccttacataccagagtccctgcagggtcaggctgaaggtcccctctgcatgactttgagataacacctctcttggcttcctcccttcctggcctggtttttccccttcctcatcgacttcccctgggaatacattcttaatacttgatcacttgtacgggcacccttgtcttgagtacagaaagagctgtgggtaatcagctcttataaggcaaagtgtacacctgacctgtgttctgtcactctaagttgtgccagagctgctcctgaaactcctcttgccctctttcccaggatatgcctggctgtgtctgtaccatggagaacaagaggctggaacagcaggagcccatctgctgagttctacaaaggtcttcacatggagataatgcacagtgtctgttgcacaaataagtagctaccaggagacttcaggccgggaagtcctagaaataatattgtccccaaaatcaactgaaacaaaaccattaaaaactatcaaaatctacccagtaggaagtataagaagaaactaaacgggactacaaatgtcttttcaggatttctggaaaagtcttacaggtatacaaatattaactgaagaagctgagaaatcacagataaatgaaaaatgataccaccactcaggaattatggctaacactcaggaatactgctattttggtattctacatataagaatgtatatgtagacttctgtgaatatgtatgcaaatttaaccacaaaaaaattacagtagacttttttgtaatctgctttcatttaatcataaatgctaaccacagagttagcatttgctatgctattaagcaattcacaaagtagttttacttattttatttattgtatttcacaggtacagtgatttgttttgtttttaaataaacaggcagaacttctgcaccgagatgaatattaattccttcacagcaataacctcaggggcctattctctagtcaaacagagtaagtgttatcaaaaacagcctttgcttgtgaaatttgaagtctgtgatgcttctaaaagatactcaaaatgatgaggctcttcatttgtttaaaacagtttaaagtcactcaaagccaactgtttgagaatgcagatgagaaaaatgggtaaaagtgcctgcaatcaaaactaaaatgcgacaagagggcaattgggttggatagcagggaggggattcacgtttcatggataaactacacataggataagtgaatgcaagtacgtccacaggaaggaataacacccacttagatttatatttacattgtattgcctttattttcttttagataccagtctcattacttacagtacaaagtcacaggatattatttagacatttggttctttcctactgtgggcctttgctccaaccgcagtctgtacctgcaataccccatgaccctattcaagacttctggaactctcaggtctgcatccacctcccccatgtccatcatggacagggcctcaattacactggtcaccatcagaactaaccctgaggatcacaccatgaaagaccctgccttttccatcttgctggtccaacagtgcccactacagtgtttttctgagagttgaaacttgaaattctgaactgaaaatactcactccatatttggacagagggaaactggaacttatacactactataaagaaaagagaaactgataccctccctccaagccagtgctctctgatgcttgaccatggcatctcacacactgtgagggttgcctgtggaagtcagcccagatacttgctttataaacctgcatatgtgcccagcagccaagcatctgaagcccagcaatgtgtacggttttttaaggagcccatcttgctttccatccagaatatggctctccatgtcagagttgtgacacttcacctggaggtcatggtctgggatctccccaaatttaatgcattttatttttcctttgcaggaactttgtgtaactttcagtggatcttgaaagagtctgtatcagttttctattgctattgtaacaaattaccacaaacgtcatggctttaaacacacatttcttgtctcacatttctgtaagtcagaaggccaaaattagtttcactgggctaacattgagatgtgtgggcaaggatgctttctcctttagcggctctagagtagaatccctttccttgtcttttccatcttctagaagcttcccctgttgctttgcttgtgactctctcctttcatcttcaaagccagcgagaggggcaggggttggggtcttctctgtgctgtcttctgtagtcacatcttcctctgaaccctcccgtctctctcctccacttatagtgaactctatgtctacattgaattcacccagataatccatgatcatctccctgttgaaaggtaatacttaattccatctgcaacctaatcccctttgccttgtaatctgacatagacacaggtacaagggattaggatgtggctatctgtggggagaccattattttgccttcctcagggtctgtgaatatttctctgaaaaaaaaaagatcagaaaacatgttataaaatatcatgtgtggcacttactctaaaattgataacatagttggaagtaaaaccatcctcagcaaatgcaaaagaactgaaatcataacaaacagtctctcagaccacagtacaaccaaattataactcaagaataggaaactcactcaaaaccacacaattacatggaaattgaacaatctgctcctgaatgactcctgggtaaataatgaaattaaagcagaaattaagaagttctttgaaactaatgagaacaacaatgtaccagaatctctgggacgcaactaaagcagttttaggaggaaaacttatagcactaaaatgcctacatcaaaaagctagaaagatctcaaattaacaacctaacatcataactaaaaaactagagaaccaagagcaaacaaattcaaaatctagcagaagacaagaaataaccaagatgagagctgaagtgaaagagatagagacatgaaaagttctttaaaaaaatcaacaaatccaggagctgttttttggaaaaaaaaaataagatagatagaccactagctagactaacaaagaaaaaaagagaagaatcaaatagacacaatcagaaatgataagggggatatcaccattcatcccacagaaatacaaacaaccatcaaataatagtataaacacctcgtatccacataaactagaaaatatagaagaaatggataaatttctggacgcatataccctcctaagacttaatcaggaagaaaatgaatccctgagtagaccaataacaagttctgaaattgaggaagtaataagcagactaccaaccaataaaagcccagggtcagatggatttacagcagaattctaccagaggtacaaagaagagctggtaccatttctactgaaactattcaaaaaaattgaaaaggagggactcctgtctaagtcatccaatgaggccagcatcatcctgataccaaaacctggcagagatacaacaaaaaaagtaaacttcaggccaatatctctgatgaatattgatgtaaaaatcctcaataaaatactggcaaaccaaatccagcagcacatcaaaaagcttatccaccagatcatgtgggcttcatcctcaggctgcaaagttgcttcaacatacacaaatcaataatgtaattcatcacataaacagaactaaagacaaaatccacaagattatctcaatagacacagaaaaggcctttgataaaagtcaatatcccttcatgttaagaactctcctctcaataaagtgggtattgaagaaacatatgtcaaaataataagaaccatatatgacaaacccacagcaaatatcatactgaatgggcaaaagctggatgcattccctttgaaaactggcaccagacaaggatgccctgtctcatcactcctattcaacatagtattggaagttctggccagggcaatcaagcaagagaaagaaataaagagtattcaaataggaagagagaaagtcaaattttctttgtttgcaggtgacaaaatcctatcatctcagcccaaaagcttctaaagctgataagcaacttcagcaaagtctcaagatacaaaatcaatgtgcaaaaatcacaaacattcctatacaccagcaacaaacaagcagagagccaagtcatgaataaactcccattcacaattgctacaaagagaataaaatacttaggaaaatagctaacaagggaagtgaaggacctgttcaatgagaactacaaaccactgctcaaagaaatcagagaggacaaacaaatggaaaaacattccatgatcatggttaggaagaatcaatatcatgaaaatggccatactgcccaaagtaatttatagattcaatgctatttccattaaactataattgacattcttcacagaataagaagaaatgattttaaaattcatatggaattttaaaaagccccaaatagccaagacaatcctaagcaaaaagaacacaggtggaggcatcacactactgaacttcaaactatactacaaggctacagtaaccaaaacagcatggtactggtacaaaaacagacacaaggatcaatggaacagaatagagaactcagaaataagactgcacacctacaaccatctgatcttcaacaaacctgacaaaaacaagcaatggggaaatgattccctgtttaataagttgtgctgggagaactggttagtcataagaagaaaagttttgcaatctatccatctgacgaaggcctaatatccagagtctacaaggaacttaaatgaatttacaagaaagaaaacaaacaaccccactaaatagtggacaaaggacatggacagacacttctcaaaagaagacattcatgtagccaacaaacatgaaaaaaagctcaacatcactgatcattagagaaatgcaaatcaaaagcacaatgagattccatctcatgccagtcagaatggttggatattaaaaagtcaataaacaatagatgctggtgaggttgcagagaaaaaggaatgtttttactctgttggtgggagtatacattaattcaaccattgtggaagacagtgtggtgattcctcaaagatctggaggcagaaataccatttgccccagcaatctcattactgggtatatactcaaaagaatataaatcattctattataatgatacatgcacacatgttcattgctgcactattcacaatagcaaagacatggaatcaactcaaactcccatcaatgatagactggataaagaaaatgtggtacttatataccatgaaatactatgcagccataaaaagaaataagatcacattcctttcagggacatggatggagctggaggctgttatcctcagcaaacccaggaacagaaaatcaaacactcatgttcttacttataagtgggagctgaatgatgagaacacatggacacatggtggggaaacaacacatacagggtcctgtcagagtgggggaatgagtacatcaggaagaatagctatagctgatggatgctgggtttaacacctaggtgatggatgggttgatctgtgcagcaaaccaccatgacacacatttatctatgtaacaaacgtgcacatcctgcacatgtacccagaatttaaaataaaagcttgaaaaaaaagtcacatgtattcatttatcaaaactttatcaagtattttcatctactatatgctgttgctgtgcttagatggtaagatgcaactataaataagaaatctgtagcctgacaaccatcttgatttacccaggacttaagggggtaaatcgggacacagaattttcagtatcaaaatcagttcagtttcaggcaaattgggacagtcggtcatctgaggtacagtctctgccatgcaagaatttaccattcagtgagaggcatgaactaaacacaatcaagcagatgtttaaaaaaattaaaagttgcagtatgtgctttaaaggaaaagaaaaaggggctgagatatagatgaacaaaacaagtgccacctctttctctgcgagctccttccgggtaacattgatcatactctaaacacacgtcaggcgctggctacacacattgtcttgcctaactttcactggaaccccatgaagtgaagacacttattgcctgtagtcttcagttgagggaatagaagagaaaaaatgcctaacatcacagagcaactatctcacatcctgttccccagaaacagactctgatacaaggattcatgagcaagtaatttagtaatttagtaaggaagtgctcccagaggaaattagagagtcgagtgcagaataagaaagggaaggaagatagcaaggatgagatgtcaggaaaaattccctggagggtggcttcatcctgatcctcaggggaagtgggtgtaaattatctccgagagtgtcttccaacaggaggtggggtggccccaggtccctctggggcatgtacaatccctaggcatttcagctctttctgtgctgtaagaaaagaatcacaggtatggctgttgaaaacaaaggcacaccaaagctaggagagggaaaacaaaccctaaaggtaggccaggtggtctgagtaaggcagcagccgccccacttcagccagtaagtggaaaaccaacatttgaacccaaacctggtgaatcccaccacaccgtggctaaacctctcttctattccacctactttcacatacttacacattttcttaaaacctaagatttatggtttttttttccagatttttcttctacaggagtacatcctattcaccagaattggtccaacacaaatattaaaataaaagtgtgctgccattaaaaattgatagggtcagtgtcacatcccagagtgaccctccccaggtaattcagtggctttcctctaacacttgaattgctaatgaagagagctaattagcatgtcactgataagattatgaagattaaatactacttcctgaatctcagtgatttttcaaatggcttttaggcaccacaacccatctcagaatttatacaaacacatacaaacacacacacacacacacacacacacacacacacacacaagctttaattatgtcagtgctttatgcaattgggagaccaggaggcagtattgtgtcttttcagaattactgtaggtgtgatagctcctaatttcaaacatcataagaccttcatcttcatggcaaatgtgatattttagtatgaccttggatctttactatttctgagaatgaatcttttatggatgccagatggaaagtacaaaattaatatccccttgtagactaacacccatatgttttccatgtactgcagagatgtactttgttcatagtgccattcatttaaatgaaatgaacatctacacgatgatacattgctgtttctaaattttgtactggacttagccaataaaaagtacttaatattggcatcaaaatgtctgaaaaaagtaaggctgccaaatagtgaataataatcactaatctcttataattgcgtgtgtgtgtttgtggcctatgtgtgtttggagtaagccattctcatgctgaaaaatgaacacacataaaaatcaatactcaaaatagtcaaacatttgtgcatttatattacttaaggctagatttgacagcaactaacagagatccacaatggatgaagtaaacaagacaaaagcttctttctctctcacataaatccaagttgttctccaaaaattccttgcagctcactaatcaactgtctgtaagttatggccctgatcttcgtgatgcaagacggcaacaccatgtcccctttccaggtaagaggattcgtcagttgtcttttaagaaaggacctacaaagctgccatgtgacacttctgtttatagttcattggcctgatcttgttcacatgttcatacccagcccccacaggaggccaggaaatgtagtcttttacataaataacttgctaaaaaaaaactggggatatattattgtaggggactgagggtgaaaggatctcagggaattaacacagcctctgccacaagcatttatgattgtaatttctaaagatgccaatatggccaatttcagtaagagctattcatgtttcttttttgtttaagtcaaagtgaattttttttaccctcagcttgcttattccagggttgaaattaaatttgagttcaactgtaattttgaatgaaggcctctgatacatgcaaaatccatctgtgccaatgctggatcccttgaactggaccagattctgtaatacatcatttaatttgccttagggacggaaagctgcctcacacaaggtcatgccttcgcctcccgggatcctcacattcaaagacatagccatgtgggtccataaagagcctgcccctcccaaggacagcactgaaggctcatcccaccttcagagggcccaaggagtgggctgaggcttccttgagcctgaatggactctcaacgcttcctctgcccagttctcttcctccccctcccttgcctctatgactactgccccccaagaacacctcctaagcaattttctctccatctcagaagctgcttcccagggtactgaaatccttacttggtcactcttcaagcacatctcttgcactcaactgattttataatgaggtggttgggcccattgtgccagtcaatagatgccattctgatttctgatagtgggcagctctgcttagctcttctctctcatcctaggaatccctggggatacttcaggcctcctctttttgggagcagatgtccactggatgattataatctttaaggagaatgtgctgtagccaggaagagtgggaatcagctacctgagttctatctttgatctgccatattcaggcaatgtgatgttgggagagtcagttccttcatctctaacattagaatagtaaccccacttacaagggttattgaactaaataagttaatctattgtgaactcctggctttgtaattctcttcctgcccatttcttgcatggctcagcctaaattagaatttacttgcccaaatggtcaggtggctttggctttcttattgaactttgtaacattaaagggatcctcaacgggaatattcacaacagcttccctgcattgtggtctctcatcgaccttgtgatggcccatcattttccttgagctagtggtcactctgcccgaagtttgtatctgctacagcttcgtttttgaccttgcatggctgttccaattgctgccaaatatgggttcattatcccatcattttgtctagtccaggagattccactcagctcaggaaaacattggagacttaatgtgctcattctcaggaacatcagctgaaccactgatggaaatctccattcaactagataacccaggaagagcaaccatgccttacagcagcggttctcaaagcaggaatctttgaccaagagcatcggcctcagctgggaactcatcataaatggcccaaagttcttgttcctaacccagacttaactgaattaggaactctgggaacaggacccaacagttcatgttttaaccagccctccaggggaggaggagtcttgcaaaatttgagactcactgctttagagagaacccaaagggtgcagacaggagagctttcctaggcaatattgcactacttttaaatcagttttttcccctctctttccctcttccccacttctttccctctgtttctccctgtctccccatctctctcttaatttagtgagtactttagggcttaccttagcaaaatcttccaaggttggtcttatgcctctgaaaacacacgcatgcaaacattcatgaaaattttagagtaaatacattctaaatactaggcttggtaaatttttttccctagctgtcctcagcactccagcaaaaaaaaaaaaattgattgctaaacttttttgccatatgacctggaaaagactcagctgctgatggtggctctggccaggctgcaggcaataaagggctcgctaacctgcctctatttgctttctgttcaagataaacatttatcactgggcgtattgattaacaccatatcactttccttcttacactttcgcaaagggagaaggctcctcttgggagctcgaacctttgtggggctcatgagaccccaagggctatggtggctatgaagaagccgtgagctatgagaaggcatggggaccccctgctaaggagaggccagctaccatactcagagctagttggaatattaagggatgcttatcctcagacagccaatcagggagcaaactggttactgcagagtgagatgtggagttaacagaaggattcataaggtcattagaaagtggcattgcaggcctggagcagtggtgcacgcctgtaatcccaccactttgggaggcggaggtgggcggatctcttgagctcagaagtttgagaccagcctggtcaacatagtgaaaccctgtctctactaaaaatacaaaaattagccaggcatggtggtgcacgcctgtagtctcagctacttgggaggctgaggcaggagaatcgcttgaacctgggaggcagaggttgcagtgagccaagatcacaccactgcactccctcctgggcgacagaagaagtctccatctcaaacaaataaaaataaaaaagaaaatggcagtgtccaagtgtagaatcccaactaaaaataaaaatgtctacctaaatagcctggaaaacaagctgcaaatgaaccttccattgtttgaagggttttttcccttcttttttttctctttttttcaatgataggaaggcaagacgagagagaaaccaacaatattggcttgatttgcaatatacaaaagacgtacgaaaggagaactatggtccctgagtgttttaatatttgagactgcctcagttcctaactggaagtgggtatggtttaaattaaaaagaaacagatatttatgtactgattcaccaccaactctttctctgatgttttgcttttgttgataacctttcctgtagcattaatactgctgttttgattctatgcaactggtgagctaaattattcttatttaaaaatcatgattatgcatcccgagaagggtatttttattcattaaacctaaagtggttaattcatggttagtacagactgtgactaacctgttgttttcaaaacaaattatcatgacattaaattgcacagttgcttatttctgtgatctgctttgattctggagagagcctgggttgtctgtctgtcctttaagagaggtaatgtggaaggaatcctgggggctgcacctatgagccccccgagagccagttggtgacattaggaacattggctgtagttgtttctttacattttagtgcagatattttctggcttaaaaacttaaaagcttctctttttaaaaacttggcaaaggatttttctaacctacttttttgagataattgtagattcatatgcagtttccaaaaataatataaggagattccatatattctgtgtctggttttccccaatgtaacatcttataaaatgattgtacaatatgctagccacaatattgacattgatagagtcaagatagaaagcatttctgtcactacaagggtccctcatgctgtctgctcgtagtcaaacccatttcttttccaccctatgctctccttaaccccgggcaacactaatctgtcctctttataactgtgttatttcaagaatgttatagtcatggaatcacacagtataaaatattgggagaaggaattttttcccttcagcataattctctggaattcttctaggttgtttcatgtatcaatattttattcccttttatttctgagtaatattctatcgtatgaatgtaccacattttacttaatttattagaaagacatctgtgttgtttcagtttggggctgttatgaataaaactgccacaaacattttaacttttgtatgaatataagtcttcattcctctgctataaatatctgggaatgcaattggtgggtcatatggtagtaatgtgtttactttcaatgaaattgctaaactgttttccagagcggccgtgccatttaaccttcacactagaagtcgaagagtgattctgtttctctgcatcctcaacagcattcgtcattgttactattcctaactgtagttttaatttgcatctttttatggctaatgatttagttaatccatgatgaccttttaatttttttatccgcaatttacatatcctcttccatgaaatgtcttttcatgcctaacttccaatagaattgttggggttttttattgttgactctctctctctattgcccaggctagagtgcaatggtgtgatcccgactcactgcaacctccacctcctgggtccaagccattctcctgcctcagcctcccgagtagcaaaagttctttatatactgtatattttagtctctctgaatatgtggtgtgcaattattgtttttccagtctatagcttgcgttttcatcttcttaacaagtctttcataaaggaaaagttttttcgataaagccaaatttatgtttttcctttctatgtatcatgtttttggtttgaagtctaagaattttttacctagtcttaaatccctaagatttaatattaagttttattctaaaaatgttatagttttacattttacatttaagcccatagtccattttgatttaatttttgtccaagttttgagtcttaggtcaaggttcatattttgtcaatggatgtccaattacttcagcaccatttgttggaaaggctatctttcctccactgaatctcttttgcaactgtgcaaaaatttctgggacttcttgggtgggtctattttcaggtttcccattctgtttcattgatctctgtgtctatttctttgccagttttacagagtcttgattactttagctacatagtaagtcttaacatccaataaactgatttcttttgctttgttgtttttcaaaattgtttaatctatttttagttcctttgcctttcaatataaattttagaataatcttgctcatatctatgaaaaacatcttgctgatatttccataggaattgcattaaagttgtatgtgaatctggggagaactggcatctttgttaggttgaggcttccaactcataagcacaggatgtgtccttgatttcaattagctcttcactggtttctttgaccagcattgtgtaggcagcagcataaacgtcctttacatgtttttttacatttatacctaagcatttctctttttttgagcaattgtaaattatattatatattaattttggtgtccatgtgttcattgctagtatggaaaaatacaattaacctttttatatttatcttgtattctgcattgttgaactcacttattagttctaagagatttcctacagattccttcagattttttatatagacaaacatgtcatccacaaataaacgcagttttctttctctctttctcatatgtatgtcttttatttacttttcttggcttgttgcattggctagaagctctggcagaatgttgaataagagtggtgaaagtggacattctttccttgttcccaatcttaggaaaagtgttcagtatttctcaattaagtaatcctaggtgtaggtttctgtaagtggtctttgtcaagttaaggatgtcatcttttcctatttttctgagagcttttatcattaatgggcactgaattctgtcaagtagcttttctctgtagattgatataatcacgtgatttttcttcttcaatctattagtatggtgaactgcattgattaacattcaatattaaacctgccttctatcctgggaataaaacccatttggtagtggtgtataattctttctatctatcactgcattttatttgctaatatattgttaaggattttttgtttacattcatgaaggtctataattttatttttgaactgcccttgtctggttttggtatcaaggtaatactagtttcataaaataaattggaaagtgttttctctcttctctattctggaagacattgtatagaattggtgttaattctgctgtacccatatggtagtattctccattgaaaccatctgggattggagacttctcttttggggagttattaaattaaaatttcaatttccttcattgttataaaagtattcaaattttctgtttcatattgggtaaattacgttttttttttttcaagaaatttgcccatttcatttaagttgtcaaacttatgtgtgtagagttgtttatagtatttcctttctatcctttgctgtctggaaggtctgtagtgatttctcctgcttcactcctgagatggtattttgtgtcttctctccttttctttgtcagtcttgctagtggtgtgtcagttttattaatctttttaaagaatcaactctttttttcattgattttctttattgctttctgctttcactttcattcagtactgactgtatttttattaatttatcccttcttcttgccttggacttatttgctcttctttttctaggttcttgaggtaggagcttatattattgagctgagaattgtttttctaatgtgtgcacttagtactatgaatgataaatgtctgtctctcttagcaccacgttagctgtgtaccacaaacattgatgtatattttcatttttattcagttcaatttttttttaacttggagcttcctctttgacctatgtgttatttagaagtgtattgtctagttttcaagtatttgaagattttcctcttatctttctgttattaatttctatttttattacattgcagtcagagaacacactctctatgatttcaattcttataattttttgagatttgttttattgcccgggatatggccaaaattggtattgattgatggtgttcaccttttctctttttcttggtcaatctagttaaaggtttgtcagtatgttgattttcacagaactaacttatggttttgataaacaacataaagatgttggagagcaaggaggcattggaaataaaccaaaagctgagttttcattttggccacatgctcttcataattgtttatttttggtttgaaataaataaataaacaaataaataaagggtttttatgtatgatgcttgtgctctaagtaattcgggcaagagtgacaccactgcctgcctatcagcacttgcaaagaaaaaccaattactgtcagcccccttcaaaaaaatgtatctgctaaaattgcttgatgacatggaaatccacactgaggtgcttatacccaggggcaaccaagtctcccctgcagctggggcctataaccatatttccttcatttcacaaaaatcaaaagtttaggaaccacgaggaaggagcaagaataaacaccactacaaacctcaaaccaacagcgctgagagattacagcagcctcaccctgccatttggggctagagactgctcacatttattctgtggtcagcgtccattggaaagcaacgcagcacacaccacggctgtgtttgagctgatattcactaacactgaactaactgcattccaatccaaagacttcgcaagtgccctctttcttaactgggaatctggcagaatgttatatttaaatatcaaacgttgttaatcatgtcagcggtactttagtttggataaaatgtctttcctattgtagctaattgcttgaatatctgcagactgatatactctttgtagacatttatgctgtcctctttttataactttatttcattttctcttcatttctggtgttgactcaaagggcctttatcacctcatgctgataatctgtgctttatggccgctggtgtgattgggagcagttgaagccgcgtgcaataatacacacatataaatatttgaacaggaaaaagaaggtctgtctgatgtagaccaaggaagaaatgcatttaaacaaataatgccactagagggaccttgactctgaaccacgaataggcagggtcagacttggaagggcaccctctcattgcccggcttgtacgggtgggcgctagtgccacggcccattttaaaaagcaggttcttccaggccccatggcacagggagccgagctgggtccatgccagcaggcttatgacgtcattgttgtagcttgcttatttggtcaggatcactaaaataattccctttgagaagaataaatttgctcttgcagaaagttaaagacctgagaggttttaattagtttaccctgccctcgcctttggtcgccaaacgttattgcagagttcaaagaacatgatgttgtgtgtctccctttcccatttttgcgtgggggccttttccccctttttagcacctcctgtgaatagttgaaaatgagtggcaaaatgacattcgacttagaaagtaagagcaccaggaagcaaaactggaggcaaacacagcagctaatttcaccaggcatagctggtgctgtccgcggttgtccctgacagcgcggccgacacagaaccacctgtgtttgctcactagctttccccaatctgcgagaaaatggcccgggccggtcacatggcagccagataggccaggcaccatgggaatacaaaagccggagcttttagcagagttaatcattaatgcgccttttctttgtcccattcaggagtgctgacagggctttgatagcctgtatttgccatcagccggctgcagtcctagccaggtactaatgagacccctggctccaggctccctggcagagcccagagcccagcctggacccaggtgctgccatcaacctgaagcctgcctgccccctgagctccctcctgctgcccgctgtgcccccactccttaggccttgttctggttgatcacccacctgcctggaatcctgcacgtttctgcaaagcatctgcctgagttcagcgaagcaaggctaggaaatgtgtgattataaagcccataatcctctcttcccctgtgtcatccttcccccagctaggaaaaaaaaaaaaaaaattagaaagctaagctgaattttttttttgtttgtttggatgtgtaccaaggatggattgttttgccctaacatcagtggggtgttttctttccaaaacttagcttagagagtcacccacgggtatattctaatatttccactcagcaagtaaaatgcaggtgtccctgacagcaatttttttaaatagaaaacctcaccttaacatccttaatggtaagtagcttgtgtgtcaacatgactggagctagggtgaatgagaaccacattaaaaccttccagctaccagttcttttttttttttcttttttcttttgtgatggagtcttgctctgtcgcccaggctggagtgcagtggtgcgatctcggctcactgcaacctccgcctcctgggttcaagcaattctcctgcctcagcctcctgagtagctgggactgcaggcgcatgccaccactcctggctaatttttgtattattagtagagatggggtttcaccacattggccaggctggtcttgaactcctgaccttgtgatctgcccacattggtctcccaaattcggttcttttatttgaaatcaccaccctcccaagaacgagatatcccaaccttctgattttatgcttggcctccagcgtgctcaaaatgttcttcagatttgtgctaccatcttaccactagccttctcaaaaacataaaccacaaatgcaccattgtcctttaagagtagttgaaaacaagcaaatcagcatctttgaaacctggcttaataaagaatagagattttaaagtttgagggaattaaagagcagagatttttttctaggaactgtacacatgaaaattttgctgatggctgctgatgatatataaaggcattgccagtaaacgtattacactaaatgcatggtactgccaatggttctcatatctccctttctccagcgtcaaaatacctttaaagatcatatccaattgatctttacaacatctagggcatattggatgatgtcaaattgtattgctatctttttttttttttttagcaaatgaggaagcaaaagttgacttggaagtgaaacaacagacggatcaatagatcccagaaggatgtgattgtgtggccactatttcgggatggagtgacagcttgccattgcatgctacttcatgcaccttgtggcctggtttcattcttaaggaaattgtccatcctccctcaattttactgggcaccttctatgtactgcagagcacttggctctagagggagcaaagacagatgtaatatggttcctgccactgagaagcagttcagaaggcacaacatgtactacaaaaaaacacagctcagggagagaaagtgtatggcatttcactgctgtatgaagaaatgcctaagtactttcatcctggcagaggttagccccagatctgaaaactctccagaggaaggaaaagctgatgatttcagaggtcctggatgttagaatgtggaaggcacccaattcaaataatgttatcagttttaacataatgagcagctccatagtgtcatcggcttttatttttttaaatgctcttcatacaggtagcatgaacacagtttataacctctctattccatttgatcacaagctcttcaaccacagatttgtacataaggttagagttgactctactttttaaaaattccatctttgaagtagaatgatagttaccaaaggttggaaaatgggagtgggggagtgggaaaggggagatggtcaatgggtacaaaaatatagttagaatgaatcagagctggtatgtgatagcaccgtaggatgagtacagtcaacaataatttattgtgcatttaaaaataactaaaagagcataatttgattgtttatgatgcaaagaaaggataaatgcttgtggtgatagatatcccatttaccctgctatgattatgacacattgtatgcctgtataaaaatgtctcatgtatcccataaatatatactcctactatgtactggcaaaatttaaaaaattaaaaaaaaaatctttctttgttcctccaccacatgcagttggtctaaaatacaacctttggctttgaaggaggcaaagctcttgactaagcatgcattcaattaaatgtatttcaatgtgcccaaagaagataaaatagaatattattttgttatttggggggcaaagtgatctgaatctctcattgggataatcagcaattaaatggctatatgagccacataatgcaagtcaagttaacatattgatagtgaagtattgatattaattcatatggacattctcctataattgttaaagtggattgaatcaaaagagaaagagggatgtgtagtgtgcatagtctcattttctgggaaaataatggatatcttagtttaacaccccctaagtcaagaatttgagtgcaaattgtttatgtggaaggtgatcccaggaaacgtggcaatggagaggagagaggagagaaaacaatcactgacaggtgtgtgtgatcagttcatcgctgtgggagacgggagctcggccctgcagggaacccagtgagaaactgtgcaaagcccactccaagattgtccacgagcaaaagggaagctgggttatttgcccaccaactcctgtccttcattgattgaggatgcttcctggatgtgtcaactctccaccactctggccaccccagccactggggcatacactctccccacaggatgtattccatacgtagggagatgtctgcaggtgacctctgatgggccaacggaatatgaccaatgcttcatcacaaacttcactgaaggggaagcagagggcagagaaatgaagctagcactggggccaattgaagtctacacagtgtataagcagagcccttggccctctaaatataaggggaaaaaagatgctgcttcttggataaaccacagttatttccggtgccttctgtttgcaatataaggatgctatcgaatggagagacgggctccgcaaaactcaggctgcagatgcccagtgggtttaccttaaaagcacaagaaagccatcatcagctctcggatgttgcacctcaaagggtttgcatgttcccccgtgtggacactcatcttcccaatatcccaggagcttggttggcttggctgtggtcatatgggaatgaataaccaggaagtgaaattcatgtgtttatttattcatggtggtagcccacctaaagtgctaattcttaaagcctctttgcacaaagtcagttttgtaagttccattcaactcatccatgcccccgtagcaagggaagcctcaggtcactggttttcagagtgtcttaggagatgatgatacctgcaccagcagcaccaacattccctaggaacttgttagtaaggcatatggtcaggtccacccccgaccttctcattcggaaactcctgcagtgggccttggactctatttccacaagccctctgggagatgctgagggctgctaagacctaagaatgcctggtgttccaggggaccccactttaaggccctctgcctcctctgcttccccactgttctcagttctgtacattttttaccatattcatgagatgtagatggtattaatgttaaaataccatatcgagttaataacagcttttcagaatggaatggggaattatcttacatctcaaatgaaaaaaattataaaaatataaaatacaggcatctggaaaacacagaaacacaggcatttgagatgccccatacctgactctaacaacactgaggcttttgaaatggagattccttctctgtctcacaggaaggtatttcttttccggtatcctctctgaaccaatctggagcatgagagcagagcagagtgaagagagctgttcctaccatggagtggcatagaactgcagggagtccagtgttctcagcatgataaggaggggatgctgggaaaagtgcaggccctccaactcaccaggccacctgcaagctgtgcctgcctgcactgcacaggcccatgcacctctcaaggggcgaatgctcacccctgggttttagaaaggtgtctgtctacacaatggctttaaatacaaaccagatgcttctcctgctgctcaagttcagctgagtagccatttatccaccctggctctgaaagtaacacaggctccttggatccacggagaacagcaatgttagtctctgtggggcccttttaatggaaattttaaggacaaatttgacaacacaggtgttgtaggttgggttccttaagaaggagacattgaggtggaaccaagcaaggtctttatttgggaggggaatggatctacacctatgagagggaagagaaagaaaaggatgagccctagcgggcaccatggggagttctggacctggattgacctttagggttgttctcatttggggtaaggaggccaagcctttatacctcagtgttgctcagggactgggcatgagatgaccctggagggatgaaccagtacccagcacaatggagttgccttgtctgtggactttgagacgaactctgacagaacaggggccccttacctcagtattgtgatctccagttatgattttgaacaggctatgaaaaaattatctgattttctattcttattgaaaaaaaagtcagcagaaaagactttagcttaaaaaaaagcacaaattatgcttttgtgtcttttgttgtagttactttctccacaaaaagacttattttttagggatactaattttctaccccagcagtcaaatggaggagaaattctcattcctatcttactctgttgatagaacagtacttcagactgaagacacacattatggataatttcaggccatatccagatgtgaaagttaatctgggatgggcttgaggggtatttgttagccatttaggacccctatagtcaacctaaaaatattaacccattcatatcaacaccaaagtgcaaacagcctaggtgtgcatcaacaggtaaagggagaaactgtggttgctcccctccatacaatggtaaactaggcagcaatgaaaaagaatgagcataagatatatacagccatatggatgaatctcaaaagcacactgaatgaaagtaaccagactcacagactgcatagtgtatgattccatttatgtaaatttctaaaacagagaaaactcatctatggtggaaaattaaagaatagttttcctcagaaaggggagtgcacaagaagaccgactgtgaagaggcaggaccaaactttctggggtgatagaaatcctctattgtgacaagaatttgggttaaacaggtgtctacatttgtcaaaactcagcaaatagttaatgtaaggttagcgcattttgctgtatgtaagttttaacttaaaaatggaaacaaattttaactctagttaataataaagtacatgctgaattgtttagggatgacatgcacagatgtgtacaacttcctctgaaatgcatcagaaaggaagatggatgggtagagggatgtgtcagaaaggaagtgtggggggatgttaacgattatcagggttatgagtgatcactgaataattcattcaactttcttgtgtttgaaatgtttcataatatagtgccagggaaacatcattcaagataaatttacccccttccaatcctgagctaccctctcccacttggtgatcacagcccctgagtgttgacggccaaaagacttctcttccacacaaggctctttgaaggctattacataagtgaagggagaatttcatgaatattttggtgaaaggagaatttcatgaatattttggaagtatataataaaatgacatgtttggtttgcaccacagtcaagttttccatctgttttgaatgtgttgtgttactccctcaatctcgattgttgggagacccaatacagacagtgaggttcttccctaacatctgggcacgtagcatgttcacccctctgcttgcagtgatgagaatgcttagtggactatgttctatgtctgtgttccatgatctgaataaaacatggactatgttccatgttctgaattgaaacaatccttgttgttctaaatgagtggccaagaaactggctcattctacagtacaggctctatggaatgacctcaaagttgctcactgtttagccccagtggtaacttatcggacatctccattcttcagttctatgagatggtggtttgaacacatacttgacaacagcttccactgtggaccagggagtggagcccaggagccaagggcctggagaaacaaaggaacctgcacccagtatcgcagaactggcgctagttcgttggttgccagagatgctgtaggagtaaattctgggggatactcatcggggcaagtgattttagagtaagatcagggctaggaatgccttaaatacagatttataaaagcaaaaaggaaagagaagagaaaacagagatctcagcatctttggaaagctcaacagggaagaatggagaagagagtaatagccagctatcccagcacaatttattgaatagtgagagctttccccattgcttgatttcattgacttagtcaaagatcagatggttgtaggtggaagctttatttctgagttttctgttctattccatgtgtctgcctttgtactggtaccatgctgttttggttacctagccttatagcacagtttgaagtccagtagtgtgatgccttcggttttgttcttccggtttagggttgctttggctatctggactattttttttttgtttcatatgaattttagaatagtttttttttctaattctgtgacaaaggacatctgtagtttgataggaatagtgttgaatctgtaaattgctttgggcagtatggccattttaattatattgattcctccaacccatgaggatggaatgtttttctatatttgtgtcatctaggatttctttcatcaatgttttgtagttctccttgtagaactaaaacagagccgccattcaacccagcaatcccattactaggtatatacccaaaggaaagtaaattattctaccaaagagatacatgcatgtgcatattcattgccatactatttacaatggcaaagacatggaattaacccagatgcccaccaatgctgtactagataaagaaaacgtagtaatatacaccatggaatactacacagccataaaaaagaatgaaatcatgccctttgcagcaacatggatgtatatggaggccataatcctaaaacattaatgcaggaactgaaaaccaaataccaaataccacacgttctcacttatcagcaggagctaaacattgggcacacatagacataaatatgggaagaagagacactgtggactatgaagtggggagggtgggaagggagcagatttgagaaacaacctactgggggctatgctcactatgtgagcgatgggatctataccccaaacctcagcaacatccaatatacctatgtaacagacatgcacatgtatctccaggtatctaaagtaaaagttgaattaaaaaaaaatatgtatatgaaagtttcttgtaaattataaagaaacttttaatctattctacgatttttagttttttaatgaacacagagtgatgattctgtttagaatgataaggaatgaatattctaaccattgtaataaaatgaattccagagtgaggaaaagaaagcaaaactgcagataaaaggagactattgtatttattaagctcttattggtgccaagcactactttacaaactgtatattgaattcttaatgttcacaaaaactctataaaataagagttatgattgccttcatttgacagaaactgaggctcacagagactagaacaccatcacagagccaccattcgagttgagaggagggtaagtcctccaggccaccccacacatcagctctgcagacctctctgagcctcagcccctcatccggacagcggtgctcatgacagcagctgaacaggggtgctgtgaggattcagtgagattaggtgatggatgagaatgtgttttggaaagtctctattatcattattttacccatctgtcctagagaagagagattgctctttcaccggctgatagagtgtcacccacacgagctggcagaagtgctctctgccaaagggcatgctggatggagtggcagtgcagcctcagactctctcgctggcatgagcgatggttctacaggcagatggtgctgggaatgaattgctgagagggtctgccagaaacagctgcctgcaaacacagtccccctcccagctggtcttctagacacacgtgttcccttaggctgcaggaagtaccaatgatgatgcttcacaaccttgctcacgttcagagtgaggtcgctctgggtaatgtgatgggccaccaccctcttgattacagcagctgcctctcccacgtgcctctttgtcctcacttagaaagtgggtggtgtgcatagggacaagggacaacacgggttgcttggggcacacctgcttcagagcttgtttgcagacctcctcatccccacctccaccagggatcaggagtgctgtgtgctcagcagatgttttgccaatgccgttttcacaggcaatgcttttttctttccttttaaaatgtaatatattgaggacccccaaacagctgtctgatgggttccttgtctattagagcacatttcctctgcaaacaacagcttgcatctggagctgccctcagacctgataccttcccaccacgccccataccttgattcctcccttgccaaaagttttcccagaagagcaacacaggaaataaagttgaagacgcattgctgatggtgaccaagttctgcagcctcttgtagcactggggcgaacttcatgaagccccggctgacccagtggggagcctctgcttttcccaccacaaagtgatcctggcgcctgagcatcatccttgtgccactgaacgaaagtgagagaaattctaggaaactggagccaccctctgcagctcgggtggcctcgctttaacatctttgtcctgtgcctatagttgtccttaatacccaccacactctgcttgtctctcaaggtttggcatgaaaatgtttcctctgcaaggggtcagaggggttagtagggtgagacagcacaggatacccagacagggaagaagaggaggactgtagagaagctgagaaggtacggagacaggatggccaggggctccaaaccattcacttcacaattggaccaactctttttatatcatccatgaaatggcttccatttgcctcctgtgccatggaaccttctctccgttcccttttcagagtcttctctccatcactaaccatcacacttggagcctggacctcgatgctccctacttagggtccatcatcccaagaggctaggactcaggccccaccagccttggctattggcttgagcttgagggcttgggctcaagacaatcaactcagtccaaggtcagctttctttcacttgcatgaatgctatcattttctattttgcaatgggaattgtgagaaaaatgtgagcaagactgtaataatgcatgctcaacagaggaaagccaattccaagctcatgctctataaatggggagactatattgttgttttagtatacaccagacagaacacagcaattgatgtcatgttttacctggtggagcactgggctttgagtcaggacacattggtttgagttccagctttgctggcagccagctgtgtgtcttgggaaagtccctggccttttctctttaactaaaacataataggcatgatcatcaaggccacctacttacacatcaaagtcaatcttcacagcaagctgggaagtaggtgtctatggttcagatgtggaaaccaagggcacaaagtaggggagtagaggagtgggatgttgagggacctgccattctgaagggaaacttctgtagccacagccccagaagagctctgatttgtctcccaatagaaaccacttgctcagccacaggtcattgacttcaagctgtctccttccccagcagccctcaaggtgctctgcccatccaaggtgccacgagacacatggcagtggcttagcattactccccagatgcacccttgctctgtgtgccatcctgctttactggaccctgcctcgtgttctcacctctcctcccagctcctctcagcagtggccctggcctccatgccagctctcctatctgggctcagcagttctcctggttcaacaaatctgtgttgcttgtgctgtgtcagcttggtttacccaagagttttatttcccagaatccctacccctgcaagaacctgggttagagttgaccaaaagaagaattacttgaggtttgggctacagaggcaaagcagtgtccatcaccctctgaaggctgttgagtaggcctggcacaaggatggatggacgcagaagtgcctggtggggctcaacgggtcctcgctgtcctctgttcagtgtccagctcattctctgcaggctcagcccagctggccgggaaccagacacccagagctgcacagaggaaatggcttcccgcagacttttgccaaactccctcacggcccctctgccagggcaggtcctctcagattcactggtagatgacgcttctctgatcttccaactcccctttccaaatctccactctcccagctattcccacagagtggaaggtccgattccaatcacacaatcccgctcctggagcattccctggctccctgcttcctgcacagtggaacatccctggggggccctcactgctgcttcccagaaccaggaaatggaaagcgagtgaacattatggcagaccgtggctacaaaagataatgctgtactgccgcagcatttttaacatagaaatcttcctttgagttacctgtcaattttcttaaatgcaggaagaagcctttccggaggctggcagagacatttcttagcattttattttctgaaaccttcatggagatccaccatgacaaaacagggctgatggccggagcctgagtcagcaactcccagagcagggttatgatttctcacacctccgggggggtccatcgaggttgcaaaattctaaaacagtaattcttgtaaaatcactctaaccataaggagttgggaagagagacggccaatgggaaatgaagaaagagtggcggcaaaatcaaacaatgaaacagccatcaccccagggaggtaggagtggagctgatgagaagaacggtgggcccctctctataggcggagctaatgcagcgctcaggggctgggtggccagcgagcccaacctgctgcagctgtaacaatagtgtgtccagtgacagatggcctccagcgctcctcggtgacagtgacgttacctggagcactgggaaggaccggcactgaggggccttgaggagcagcaatcagtgaacaggaaggaattaaagtgtctcctaccagcagagaagataagcattttataggggacaggctgaacaagaggttttttttatcacttgtccctgaagaacaaagaagtcattcttttcctttgtggtggggtgggtgagggtgtggggagagtgaggaaatgtctactctattcaggacacctaggcagcttttgaaatccccactgaaattaacaaccaacgttcatcctgtacctgctttgggtaatgtctggggagagagacttacccgaaaattcgccctgtgtggctcatgggatggaaccagaagttccccatcacaggtgaggtgtgagtgatgctgagaccagacaggcatcagctttggagcttgcagggcctgctaaggaggtcagacttggttcccaggggaccaggctccgtccagagcctgtccccgccatttatgtgggcaggtttgtgttagatgccggttggctctgaagcagtgccacaattatttcaccccaagtttaaaggcactaaattgtacctgaagaactctaggcccattggaagtggcctgggaagcgaaggtccagtcacacactcttatggaatgtctctctctacagggtctggcagattagaggtgatggagagcaggggccagcgctggggaggggaaggttgcagactcaaagcaacatagaaatgtcggcacgcatcagagttctagagtgagccagagattgtctgggaattcagcttgggtgaaaaggtaggaaatttacatgttggtgactgtaaaggtccagtgcagaatctactgggctgaggccttgggcctgccctgtaaagagagccatgtgtctagtgctccaaggccacatgtggctagtggctatcatactggacaggcaggcacaaaatgtttccatcacacagaaagttctgctcaatggccttgccccagacactgacatttccatcatgacaagccatattaaacaaacaagtgtttgaaaccacctccccatgcccccattttcggttgtttttcaataagcagagatgcagaaacagggaatcctggaagcgttctggtatctagaaagcctcattaatcaaccagttttatccccaggcccccttactctccccgtctctcttccttacctggcccatgtatgtgtgttcatggtttacatgtgcacgtgtgggtgtgcacacctgatacagcagtgttctctttcctgctgcctcctaagcagaatgaaactgtctccattaaacaagctaaacattctcataatctccagcgaggacacctcacctaagccctctggtgagagagccgtcctggacatgccacaccgccacggtgcacctaacattgagtagctgatggttcttccagggctctccaggtattgtctttcctgaatacagtcaagttgcagcttgtgaattctaacgccggtacacaggatacaaacatggttcagagtaacccctgaaaatctctaaaatttccctacaagggaatgctgtattgtgtctcaggacgtgcaacccttcccatttctcggtggcagctggaaaatggttgttcttcccatgagcagtggcatggtacttggctgaagttccacgattcatttggccaaagaaacccagtataatgacagttgatgcaacaaaatattcatgccaggagaaacaggtagggttctgaacaaaacacagggcagagctcacaggtggtaccttccctagtggagcaacgacctggcgcacgcaggacgggacctctctctctcagcatgggtgctggaagtgaagtgcatgtgaaatgggcaccacagggctgcagtgccagccacctatgcagaaacacaatcaatcccaccaccacatatgcctgcactgcgctcacacatctgctttccaatgccaaaccccaaacaggccatagctgcccaaccactgggcagaatttccagagtccagactgctgggctgtccaagtgggcaacatttgaactgcagaggcagagcctgacccgtaactccttcctgccccttgccaggtagagagtatctctctctgacaaagcgggcaatgccacccacagtctaaaaatgacaaggtgcccttcgtcccaggtaactgaaaataaaagtgttatcaggtaggcacagacaggaagcaaggcaggtatcaacagtgccaggctgagtgttctggggccaggcacatggttgtgggcatccctgggtaagaatgtccagcaatgctatttgatttaaagtttcattttcctggtaacatgaggaaaagtgagagccctgggaaagatgatggagaatggagttacttccacactgatttgttgcagcctgggggctcattagaaatggatccacacagctacattacatgaccctgaaaaacacgggagtttttaaaaagcaggtcatctttctttctttctttctttctttctttctttctttctttctttctttctttctttctttctttctttctttctttctttctttcttctttctttctttctttctttctttctttctttctttctttttttttttttttttttttgatggagtctcgctctgttgcccaagctggagtgcagtggcgcggtctcggctcactgcaagctccgcctcccgggttcacgccattctcctgcctcagcctccagagtagctgggactacaggcacccgccaccacacccggctaatttttttgtgtttttagtagagacggggtttcaccccatgttagccaggatggtctcgatctcctgacctcgtgatccgcccgcctgggcctcccaaagtgctgggattacaagcgtgagccaccgcgcccggccaaaagcaggtcatttttcttaatgcttcctacttaacgtgaagataaagtatcaatatcaaataaaatatttttatattttcatcaagatatttactgtctagaccagctagtgaggacagctcagggattggataattttctgttgatcttgcttttctaacgtgtttctgggccagaaaacatttgcttaaaatattgtctattatttttatattctaaaaataattttgaaactggtaatacaatcagcatgcacagtccactaagctagggcactctgctgattccgccaggtggacatcttggtgtcagcctccaaatacaacttcactcccttttcctggacactgaggaagacattgagattccagacagattgttcttaaaaaggtatcatttgcaactgctcagctctgtggatcaaaattttatccagattgtgcaaccaaaaaacttttttacaaaaaaaatgtgttgaagtcgatatgatttccaaatttctaagagcctcaacttttctctttatataataaaagctatgtttagacattcgccatcaaactgccatattattctctttgtaggataattaaatgttataaatttaaactaaggacgagtatactagctagttattaaactaataaaatatccccttttgggttttatagattcaggtctgtgcataaaaatttatttgaaaataaaatcacttaaaaaataaaaaagcttgagagcttcaggaccataagaaccgtctacctctccattttataaaagaaaaatgaggcccaaagagaggaatcagtaagtcatagatgaagatattagcaaagccacaagtgttgaaagttctctaatactatttctattttagtctctgctcttctgccctcaggaagctcagagacaagttgggattttaaaatcagttctcttggccaggtgtggtggctcacacttgtaattccagcactgtgggagcccaaggcagtggaatctcttgagaccaggagttcaagaccagcctggttagtgagacttcatctctccaaaaaataaaattagctgggcatgacagtgcatgcctgtggtcccagctactcgggaggctgaggcgggaggattgcttgaggccaggaggtcaaggctgcagtgagctgtgctcatgtcactgcactccagcctgggcaacagagcgagtccctgtctctaaaatataaaaataataaaaagtttaataatactaaataaaattacttctcaagtaaaaaaatacagagaagctctgtggtatcgctaaccacacacaaaaaaaataaataaaaatataaacaattttaaaggtcaagtgagctcttccgtagcagctcttcaaatggcatgtagatttcactggccacagcccagctcccccagcctaaaccaggcccatagcatacttgagccaccctggggatagctgccctgagggctcagagtaaacaggtaaacagctgtgccatgcttttcagtgcaagggacctaggtgagcaggcagaggtcaatgtccacaccccagtttcatcaacaactcactggccacctaaggtcacccaaatgcctttttatctgaatctacaaaaaaaaaaaaaaagaggcagaataggccatgatggaaaaggccatactctttctgaataggagagagaagtgcctgggaatgatacagggagaagagagagggaattgaaatagcagtcatggctagtaaagctgcatgtataaatggttctttggtatccttttagaaatctagtacctactggcggctatctgcttccccagcatgtgagcagctgcatgaggctccagctcaggttagtggagtcagtaaccccagcctgtgggcagctctgtgtctgcagggacctgtgcaccctcagccctgtgagaggcaggaagcgaaaaccacctaagcagtagaagataccttttagacctgtcttgctgaatttctacaaccaccaggagaggaaagccgaacagaaactgctgcgtgctttgcagttcggagaagtaatgcaccttacctaaggttgtataaatagtagatgatcagacaggaccagccccagctcttccttgtcctggcgtgttctttcccctacacctaccatttcagaagaggaagctctaattgacaaggagctctcagcttatcaacttacttcatttatctgtaggctagagaacttggggacatattatcaaagaagcaaagaagaaaaaaaatcaacagaataactccacatccaagaggtcaggttttctccgctctcctcaacttctgtctctgtggccacccgagagggctccgggcccctctggcacctgcctccttgggttttcctctgctcctgtttatgggttttatcgagaagaggacagtgtgacagtgctttgtggtgcattaataaagataagagaggccacagctactaaacagagttttcagaacccctcccctggtttccctggctgcaggcctgcatgcacagacacacagaaccaccgatgtgggaactattactgccctccgattattgttattgtaatgcctattcagccgcccctttgtaagttcctagagggcggggaccatgtctcgggctgcttttcatgaattcatgccttcatgcttccattcactcaccctacaaacatttattgagtgctaccatcactacgcccgcctcagtgctggggactcagaagatacatcacatcctatccccagcagcacagcccaaccctggctgccagtcccaatttgttcttttaggaatggaaccccccaaatagggcacaggctgcaacatctgcatcagccagaaggtcaggaggcaacaggtggtatcttcttccttcatcatcttcttttcctccaaactcctacaacatgatcatatttatttcataacaaaaacatctaataaattccacattttaaatctactattttaaacctaaaattcttcttttctcaaacttggcttcccatttgaattagtaggggaatgtcaaaatactgatgcctgggtccccacacacagtggatctgatttagttggcttgggcatggggattttaataagctcagcaagtggctcgaactgtggcccaggttgagaaccaccatttcaacccgaaacagaggagaggttctgggctcaggagcaggaattgctcctccatttgtttgcagatgtgccagtatattctggaccccaagactctgaagctccctggtctaagcctatgttgtccacctgccttctgtaccggagatctcacttcactccttgccttcctgcccactcttggccttgggttgtgtctctttgcctgtgcacacagaacacacctccgtgctatggtcctgtttaggcttcaggactctggcccatcacagggccttttgcctagaaaagtgctctttcttctgacttcccagagcctggctgtctccacaccctgggctccaatgatcctgctccttctctgcctgcagttgagtcttcttttcttttcccttcactatggggtacacaccactcctccttcctggcctgcttggcctggtgacagcgatgcttcttaggaagggggacctactgaggcacccgcacctgtggccatgtggtagcttctaggagataccagaggggactgtggaaggacccacaaatcattctcaaccaacaccagagggtgcatatccttgtccttgaagttcaattcaaaggacatgtggacaaagatgactcttggaaaatgcaaataaacaccacaatgacacaacatttcacatccactaggatgaccgtgagttcattgctgttgttgttttaagggatataagtgttgacaaggatgcggagaagctgaaacccttttacaatggctggtaggaaagtaaaatggtgcagctgttgtggggaacggcttggcaatacctcaaaaaaattgacataggattaccatatgacctagagacttctaggtatacgccctaaagaactgaaaacagagactccaacaaatacatgcacatgctgttcacagcagcattattcacaagtcaaaaggccaaaacaactcaaatataaaactgaaggaaatattcatgaacatacactgtattcatataacacgtatttaatgttagaataccttacaaaacatataacatacaccgaaattggaattaaaggatgagattaaaaacatgaagaaacgtgtctttcctagaatccccagtggtgaccaccaatctgctcgaatgctcccacagtgacttcccttagcctggaaatttcaagagttacaatctgaagagattcttccactcccacctttgctttaattcctggcttgaaagaaaatttaaatttaaggacaaactttcttgtgctgctgtttttaaggtgaccgttttgtttcccaaatttcctctggaaaaagaacattccttcaacaaggtctctcttttctaaggagaaaaggatcaaatacagaccctcaaaccgaggctctggtgctagttcggggaaacagacacatgcacggtaaccatttctaaacacagagctgttttcagcttcatattccacagatcttgaagtattcacacatcttatgcagtatttccttttggttaagcttagccccttggaaagattaagaaagtcgtgtcctaagagtcccggggaggccgagataacatagtgagtggagtccagcctgaggtctcctgtctgctaggcagggatttcagggtgagtttcaaggacagcttccaaggctgagtggattcttgtggtcaccattgcgaaggtgtatctgaggtaattgaaattacgttagcatggtgacatatagaaaaagaatatggggacattttactcctgagcatgagggagaatcgctgagagccaggcaaggtgaagaagaaaaagagaaataataaattctcggctgggcacagtggctcacgcctgtaatcccagcactttgggaggccgaggcgggcagatcacgaggtcaggaaatcgagaccatcctggctaacacggtgaaaccccgtctctactaaaaatacaaaaaattagccgggcatggtggcgggcgcctgtagtcccagatactcgggaggccgaggcaggagagtggcgtgaacctgggaggcggagcttgcagtgaaccgagatcgcgccactgcactccagcctgggcgacagagggagactccatctcaaaataaataaataaataaattctcaaaggagactttcttttttttaataaaaaccatgtattggatcagttatcttctcaaatctctagtctaaaataatgtgggcagttttacaaggaaatacatatattggaccatatgaaatgaaccgtcaatatttgttataaatctatgaaaacattaagttcaaatggtttcgtctaacacctatgtaatataatcagtaaattccaggtactgtgcgatttaggcagagtatatgtgtgtatatgtgtgtgtgtgtgtgtgtatgtatgtacatgcacgtgtgtatatattttgtagagtccagggtctcctgtcaaacttctgggctcaagcgatccttctgcctcagcctcccaaagtgctaagattacagttgtgagccactgcacccgacatatgcagaaaatatcttactgcagtataaaacatatatctgagaggaaaagaacaagagagagaggtttctaacttaaacacagctaaccaaggaaaaaataaaatcaacatttgaatgaatattgaaattctcttaaaaaaagacaaatgagggggaaatcacataagcaagtaaggtttcacacacatggtgctctagaaactaatcagtggacagattcagaatccatatctccctttccaaaatgttctctggcagaagtcattctgtaggacaaactggaatcaaaagagttatgaaaattgtacaatgggatgaaggggcttcccctgttggggaatagatagctgacatgctggatggggccagggttcaaacaaaggcccctgttgagtgggagcaggtacaagacagatggtttgttaaacattgccagcatgcttgcgcagtgccgtgcggcggtcagagcctggataatggtcaccagggcattgtgtagcagcgcattggctaatttcagcccagctaaagctattgcttatctttgttggttttgcaaagattaaggcagtttctctgctttgaatgcaccacagctgcccagcaaagcattcctgaagttttgtctgaattcccactgctaagaggggccaagcaaaaggtggctcgtgcaaggacttgttttaagctcatatgtgaagttgcttctcctcaactaatctggaccactcttgactcttacttctgggcaaaaccctctagagttacaggggccttctttctcagtgagtcctttcctgtgtggttcgaaatgcatctgctggggatttatatttcctagatttatatttcctattgggattgattcatttgctacttttgtggaaaaaggtaaacaccattgtaaattccatccggtgaatcatggggaggcggtggttccaattaaacgtgtttgctttcggaagggggcccttggcttcttatctttatgtacagaagaaaatagagctcaaccgggcctctgcagccaatggaaacgcacctggcccagtcagctgctaggctgagtctctgctgctctgggctccaactcgctcctctcggttgtttgcagacaaagggagagtagctgcgggtcatgcagaggggacagtccccttggctctgcctatagtcccaaagcaaagcagggggtgcagctactatctgggtatgttaggaaagggtgatggctgatcggtttagtatttccaacagttcaaatgtctttatcttcttttaaaggtagtgcatatctatccccacctaattgaaccagtgctgtatttacttcaggcagccccctctgcctaaattagatcatttctagctataaaatcaagaaagtgtgcccagcagattaagccctaaaagtggacttgttaactacatctacagaagcaaagagagcaagagaatttttatatactctccctctctccctctctctctcttttctctctctctctccctctctccctctctccctctctctctgcctctctccctctctccctctctctctgcctctctccctctctccctctctctttccctctctctctccttctctccctcttgtttctctctctctctccctctctccctcttgtttctctctctctctctctctcatgcatgcaccacacacccctacctttagaactaggaaactaattcgccttcctggctccaggcctcagcatctctgcttagcatcaggcatttgtcatatagatctcaaatcaggaggctttagtgagcagctaagggctgacaatgtgtcccagggaaaagaaacccataaaggagaaaagcaaaggtctgagaggttcacctgcaaattctggacattgaaagcaactgtacgtctcctcaggtgcaaataattgaaataatactactactcaggccatggtgcagtgtgctcacccaaggcccttcttgttttattttattttactactttcccctggattccctgtgtgttctggctcccaaatcactcactcacttaggaacctcctggaacgggtttcctagtttgggtttggaacctgtctagaagcttctattgggagagagagtgctgtttgtgactccatgtcggcagctttcctttgattcctctagtccaaggctgctatttttcctaagccgttgtccatctgggtctaaatgtattggcgtgtagagtttcacagacacttttgccatctcatttttcaaagaatcacattttaatggggatttttggcaatttcattgatttttttaaactcactttatatctttttctttgctttggttttattctgtcatttttctttttctttttctaatatgtttagttatgtccttaggtatgtggtctttcggtgtcttgtttgctatttgtgtattcaaaattatgtaaaactttaagtgcaacttgagagttatgggtcataaagtttgacatttgacacttttgttcttatccagttccaagtattttgtaatatcttttaaatttcctctaaaccccaatggttatataccatacattataatgttttatgtgtccaagagatggtcgaagtggttttattgccattactgattttttaactttatttcattataatcaacacattgtgtatgtattgattacttggcatttacaaaagttttctttgttccatgggaattaaaatgaatattctctgtgggtgtaagttatgtacatctattagatcagtgttgtccaaaagaaatataatgccagccacatatataattttatattttctagaagccatattaaaaagtgaaaatgcacaggtgaaattaattttaataatattatttaagacaatatatacaaaacaacaatttgaacatataatcaatataaaaatattaacaagatgctttacattatttttctgtattgagtgttagaaacctggggtggatttagctctttcagtgcatttcaatacaaatactaaaattggatacacttgatctgtatttagatttcaatttacaattgaaagagcagattgttctaaacatacttaaaagtttttcaatacctgaattaagtattaggttttaaaatttaaattaattaaaattaaataaaatcttaaaattttcttgcattagctacacttcaagtgctcaagagttatgtagctatcggctactgtattggacaatataacattaagtaactgttataatgcttctcaaatattccaaattattggtaatttttgtctcctttgtcagtgtttttttaaaagatttattgacatctctcctactattattatatctataagaccttacattctgaaattgtgtgtgtgtttcaccccctgtttatttttttcctctttctgggactcctgttatagggagccatgttcttaactattactttccgtctcaatctcttcatcttgctgagtccttcctgatttgttcttccactgaatccaccctactattcagtccctcaattatgctctttattccaacaattaaagtctgtttgtggctgtgtgttcttgttttgtttttcctgatctgtttgagaatatttattaagcttcctttaattcatgccctgcctgaactcccctaccatctcatctagtgtgtgtggctcagttattgggctggccctgaccctttcatatcctcctgagcccacatgcatgtggaaacaccggctgccttggctggtctgacatccctgggagaaggagcaaaggcccaggtgcaggccttgcctgcctcgtggtgaggatgagcctgggggatgacatcggggtgcgtggcttccatgtttattgtgggctggacctcccctgagtgacccaccctctgtgccaggtgacagaggagctctggagagctcccagagccctactctttttctacagctgcctgccttaaaatcatccccaccttgcttaagtgggagctcgggaggagagtgctttagggctgccagagtaccagctggttcaacaccgggggactgatgctttgctgaggtgatggggaagctcttattttcttgagggaagttcagggaaggaaaagcacataactccacaaccccagccagcctcccttttggtacctggccctcctgaccctaggctatcatttcccagattctttttcgagaatcagcaaccttctaccttccatctgtggctcaccacatttgggtttaataaaagaatccaacatctccattttgttagttcatcttgccaggaaaagcgaacctcataaagtgccattttaagaatgaaatcatgtcttttgcagcagcatgaatggagctggagaccattattctgagttaaataactcagaaacaggaaatcaaatactgcatgtcctcacttgtaagtgggagctaaacaatgggcccacatggacatagagatggaaaaaatagacactgggaacccaaaagccaggagagcagaaggaaggtgaaaactgaaaaattatctgtcagatacaacggtcactgtttgagtgaagggttcactagaagcccaaaacttaccattatgcaatatatcaacgtaacaaacctgcacacgtgcctcttaaatctaaaataataataaaagtttttttgtaaaaaaaaaaaaaaagaatgaaagaaaaataaaataccattttatttttatttactttttttttttttttttttgagacagagtctcactctgtctccgaggctggagtgcagtggcacgatcttggctcactgcaaactctgcctcccagtttcaagtgattctcatgcctcggccttccaagtacctggtattaaagtgcgcacggccacaccaagccatttttttatatttttagtagaaacatggtttcactgtgttggccaggctggtcacaaactcctggcctcaagtgatccaccagcctcagcttcccaaagtgctggggttacaggcgtgagccaccacccctggccagaaaatgacattttaaaacatgtaaaaatgttggtgaaaatgctcaattccatattactgtatcattccagtctatttcctttcatcatgttttaaccttcccaaactgtgtcagtgaaattgggacaatcaaggtctctccctcttagagcttgggacgagtcaataaaataaaacacaatgggccccagcacatagtaaatcttcacttaaaaagtcacaaggtctctgatcctcagactccttggcccacactgacttactgaagggattaaagagatgcctcactccacgagctccataaatgcttctctgaaaaaaaaaaagtcttaagtaatcaatgcatcaagttcttaaagctactgataacacataacctctcacagttcacagttcagctatgttgctcacaatgtgtcaatgagatgtaaatgtggaaaaacagtataattgcttgacccaaggctatcgggcaattttctctaggttcacaccagcagcccttaatcgatgcacatccacaaatgggtgggagggaagagtcatcagggaatggcttctcctcatatcacttctcaactttagaaatcatgatgcctggggaaccgggtgtctgacctaggtagatgcttttttgtgcaaaaaataatgaagtagcctcagctctgctaactcagccctacagcaggctggactctggtgatatatccaatagatatcaagcttacaacaatgcttagatgtgactgagatttaacagagttaggagtcattaatggaatttatattggctaacctaaaaagtaactcatttaaagcattagaatttaggatatatttccaataactcatttactacaaagacaagcaaacaaagccaatcttccacccaagaacttttcctaaaatgggacttgctttgatctgcgctgtctaatatggtagcacaaatggctaatgagcaggtggaaggtgtttggtccaaattgagatgtgccttttagtgtaaaatacacactacattgtgatgacttaatatataacataatgtaaaataggtctttgatagttttatattgattacacactgacataatttttggaattattaggttaaataaaatattattaaaataaattttgccttttgtcattttttaatattaattatatttctagactttggctatataaatcactctatacttttcaaatattatttgttcaatggaaaggtgatcttaaccaggagtttaacaaaaggccacatttctgaggcatgtttctgaggcatatctttcgtaaaccattgttgttgtttttttaagactgaatctcgctgtgttgcccaggctggagtgcagtggcacgatcttggctcactgcaacctccacctcctgggttcaagtaattatcctgcctcagcctccccagtagctgggactacaggcacctgccaccacacctggctcatttttgtatttttagtagagacagggttttgccatgttggccaggctgatcttgaactcctgatctcaagtgatctaccggcctcggcctcccaaagtactgggattacagctgtgagccaccgtgcccagccgcaaaccattctcagacacataaggtgactccacagtcaaagaagttgtacccatttttccatttatcccttagtaaagctactgagcaccttttgtgtgtcagactgtttccagcacttgccagtttccagcaaataggaggcttgtctttgcatgcacagaggcagccaataagaaataaaagtaggaaataagtgaattttagagtatgctcaaagccaatgagtgctatggaaaaataaaaagtggggaatgagggaggtgtgggcaggtgattccaactgtagctctggttttcattaagaaagtggcattgaagcacagacatggagcaggtgaggtgttaagcatgctgaggctgaggggagagtattctaggtgggctggaggctggggatgaagttgaggagcagggagagggtggtagatgatctcagcgggggagtaggatgaagacacaggaagtattactggatctcagtgaaatggggatgacattgggtgctgaggtggggcgtggctcaaacctccttacatttttaaaagatgactacctcctttgttgaaaatagagtataggggccggtgtggtggctcatgcctgtaatcccagcactttgggaggccgaggcaggcagatcacgaggtcaggagatcgagaccatcctggccaaaatggtgaaaccccgtctctactaaaatacaaaaaattagttgggcctggtggtgtgttcctctagtcccagatactcgggaggctgaggcagaggaattgcttgaaccggggaggcagaggttgcagtgagccaagatcgtaccactgcactgcagcctggcaacagagcaagactccgtctcaaagaaaaaaagaaagaaagaaaatagagtataggttggtgagggtgaaaacgaagtaagcagcaggaggctcctgtaataatctaggcatgagatgggcgtggatcccattggtaacatggggttgtggaaagtggcaggattctagatggactttaaagacagaactagcagatgtcttgatggactgaatgtgtgaggtgtaaaggaaagcaagtgtctggatgactccagttttggcctaaggacctggaaggatgtaactattgggtacccactttttgtgccagtcaacatttatgcaggaactacaggaatccacacagtaagaaatgctccctgcaccgaaggagttcacagcaaagtggcaaagacacatgagtgagaatatgctgcaccagatatgatagtacctgtgcacagagacaggggaaagatccgtctaacttgtctgtggggggcaggcaagggacgtttcaattaggttgtttggggatgttacaaattcatcagaccaaaaaaaagaagtgaaaaacattctaaggtcaaggaatagcatgttcatgtgcaaagcccagtgttgacaaaggtagactattgtttggggacttgcaagtacagggtgggtggtgggttgccagtgggtgaaggtccggcctggagagacttaaagtaggacctgctcatgaggatctgtgcagagctagggaggttgggccttctcctggaggcaggggagagctatcagaaggtttcgggcaaggcaatatgtgatcaaagttgtgttttccaaagataagtcatgtggctctatgaggaatagactggagagaggatacattaaagatatataaaggagttagggaacgattacaattgtccaaggttttgttgagctttagctagagagaaatgagagtgagagaagtactaatcaaagagacttttttaggtgtaattcttacaaattgatgtccacttgaaagatgggctttcaaatacggaagaaagagtacgaaacataatctctctcatttctggtctagaagctgtcaggggtgctatcattaactgagatgggaaaacaggagggagaggcacatgctccaagaatgctgagtttgaggtatcttagtttgaagccccccagatgacgaccctgaaagaaagattcccttataaggagtttgtttgaaacactgtgaggaagaagggaagcagggcaaagaagggcaggtgccccacgagattgtggagcttaccgcagtggcccctggagctcagttctgctgtggcttctgagagatggatgcagggaacaggcatcagcaccacttgcccaagggagacggagctctcaccggctctcaggaaggcactgacttctgactttcttggaggcaggatgcctgggaaatcctcaggcggaaaggaagatgctaccaggaggaaactggtgcagcagcatgtgtgtggaaggcaagtgccaaggggctgtgtcaagggcactgaggacatcggctgaaggggcctttgagatgtatctgcaggttgagatgctgaaacaaggagaagagaattcacatacgacgttccagtgagaagtcaagcaggaggccataattctgggacactagcatgtttggctaaggttagcataagcttttcaaaataatttcctttctaaatatcccttgctgtgaagatatcccctctgcaacagtaactggtgtgcgctcctctgcctctccccagcagcagtgacctcgttgaggctgaattgaatttctggaccaacacttctccctcaataaaatttcactgtgatgggcaagaaaccatggagtgttacttctaccttttctgagaggattatttctaagattttctttctttctttctttctttttttttgagacgaagtctcactcttgtcgcccaggctggagtgcaatggcatgatctcagctcaccacaacctctgcctcctgggttcaagcgattctcctgcctcagcctcccaagtagctgggattacaggcacctgccaccacacccggctaatttttgtatttttagtagagacggggtttcaccatgttggccaggctggtctcgaattcctaaccaagggtgatctgcccaccttggcctcccaaagtgctgggattaaaggcatgagccttgtgcccagctggggttgcttttaagaaataaaattggccggacttggtggctcatgcctgtaatcccagcactttgggaggccgaggcaggcagatcgcctgaggtcagaagtttgagaccagcctgtccaatatgatgaaaccccatctctactaaaaatacaaaaattagccgattgtggtggcaggcgcctgtaatcctagctactcaggatgctgaggcaggagaatcgctcgaacacgggaggcagatggaggttgcagtaagccaagattgcgccattgcactccagcctgagcaagaaaagcaaaattatgtctcggaaaaaaaaaaaaaaaaaaaaaaaaaaagcaaccccgctctattaaacaggtagagtccagctttctcaaaagtgaagaataaattttgtcataggctgggtggggtgactcacatctgtaatcccagtactttgagaggacaaggcaggaggattacttgagcccatgagttcgaggccagcctggcaacatacggagaccccatctctacaaaaaaataaattttagaaattagccagatgtggtggcatgtgcctgtggtcccagctacttgtgaggctgaggtgggaggatcgcttgcaccctggagcactctagccttggcaacagtgagactctgtctcaaaaaaaaaaaaaaaaaaatctgtcatggactagccttagaaacattcttacattcatccccccactccccgcccccgggctctgttgccaaggctacagtgccgtggcaccatctccactcactgcaacctctgtctcctgggttcaagtgattctcctgcctcagcctcccgagtagctggggttacaggtgtgtgccaccacacgcagctaatttttgtatttttagtagagacgaacttttgccatgctggccaggctggtctcgaactcctgacctcaggcgatccgtgcgcctcggcctcccaaagtgctgggattacaggcatgagccactgtgcctggcctagaaacattcttcaactggagttggaatttttgctttagaaggaaagctccagagactttattaaaacaaaaaccaaaagataaagaaagttgagaagatcctatgtccttcatggcaggggccagtgctatcagggatttggaaatggagtatacagtggaagtaagcactcctgtgttttcctttggccaaaggcataaattctcagtctgtcttctatatttatgagcccatcagcctaagaacaatatcaagactatgtaggcatagagctttggaagtatctgaggctctgggtaagttctaatatcctctccatgcagttgacagtgtgccctgggatgggtcatttgatctttcaggatctcaacttccatatctgtgcagtggtgaacaagacccatctcacaaatatgtcaaggtaggatgggataggaaatgggaaactgtcacagatgcgataaggctcttgacagtggagaagatgtggtttagaatgcctttcactgttttctcaaccctgggtcattcttaaccttcctaaggctctggttgcaaagtgcaggcgatgaccctaaccctatgaaatgcaggccgttcactcctggggtcccatggcatgtggctcagagtgactcagaaatgctagagggcccagtggagtctttctttctagaaaagccttggatcttggagaggccctggtctctggttccacttggaccttccacaagtgtgtagtcctaggtgggttatatcacccctctgtgcttcacttactgcatctgcttcacttacttctctgattctatgcttaagaatccggacttggctacttcatcctcttcgttactctggttgactcaggaacaggtgctagaagcttcatgagccatgtgctcctaatgagcgctcactgcccgccctcagagtttgccagcaatcccagccccaagcagctgaccctacaccctaatctcaccttcagctttcagttctcctgttggcgagccctggagcaggcggaagaaacagccatcttattgggtgccacttcccaatgtcaatcggatctcctttaaactcagctatggtctgcttcattttgaacttagggtaaaattcaagacagttcagcaaagaaaatggatgaaggacgcaaccctttaattcagttcacaacccctgagggtggacagtggccagccacatgctggcccctggaaggagtgaaggaagtcgaacactgtctagcaaaacaaagcacatttggaaaataaatgtcatttaggatacaactaccaggtgcacacttctctttatgtttcagttcactctgccttgtactttaagacacgtttcctccgctacattgacccacctcccacctcggccgaggaaagcagatgccacgtagaatgacggtgattcctgcaagctctatgagtcagggacatatggtgtccccacgttccatgtttactcttgtacctggagagattagtcagccagaagcacagaatcagcctgaatgccatctggcccttccctggagcaggctgaaggtgaaaagtcagccctgcataccttgatagctaggtgagggctgtcaccaatgggggtggaagtatcatctcatgttgtacccactggcagactcatttcttctgagcaagggagaactgcattctggagaaaggacactggccattcaggctgcaattcgggttccccagccctcctgtgccgtcctcttcccagccatgagacacccgctcctgaagatcccctttcccgtggtcagccggaggcccgggaatgagtctaagagtcattggtattctgtgttttagctggtgctttgtcaatgaaaacattctggactttggccccacatctgcctgcttttcagctctggtcctgaggtcttgggtaaccttcccaacctccctaaatctccctttctttgtttgttaaatgacaatcctcatagggttgttgcctaggattaacttatctgagataatctatgtaaagcacctggatttaggagaaatgcaataaaagttagttcccttcccccttgccttggattacatggttttattctcttctgccagagattccttggggaaaggaaagcgattgtgtaatttgctgtaatcctaagtgacgaagtaaagttcttatcaaaataattttgatgtcccattggcatgtctgggccacggaaataatgacatgatgaaaattaagttgacgctattggctgacagaaagagcttagctagtcagtacaaagatagctagactggcacccaaggagccccggatcttcccaacaaggagaaaaattacacccagctctctggggaggcactggacttttgtaggcctacaagttctcttgagtcaccagcattccaggttcactccctgggggctctctaatctgtgagacctggctatggttcttagcccaccagccccaggagaaagacagtttggcagtggattttataaccaatcccatacatggagcttttccataatttatcttggggcaatatattaagccacaagttacgaagttccaaattatgaaactgtctctactgaatttccaccagcccaatgggtgtcattgtaggatttatatttttttctgggaagaatcatgttgtctttaaaaaataaaaaataaaaaaaaagaaagcctctgcttcgaatagctatctctcttgcagccgtgcactgctggctgcacaaggtcctgggtgctgttctctgggtcaacttccctgagtctgtttggagaaattgtgacatctaaccaacttcagagaaatcgatgagggctggaagggtggactttgttcccctgtggtgttctaatgaatattttcaggcttaaataactgcccaaaaatcaaaatcattgatttttccaaagggcagatacaagcagatggccccatcataaaggtacttccaatggttttccagcactcactctttattcttcatgttgaacaactgcaattctggagactgaagaatggaaaggaggaggctgggtacagtggctccctgctctaatcccagctatttgggaggctgaggcaggaggatcacttgaacccagaagtttgagaccagcctaggcaacatagagagatctcatctctacaataaatttaaaaactaaccaggtgtggtggcacacgcctgtggtcccatctactcaggaggctaggatgggaggatcacttgagcctgagaggcagaggttgcagtgggctgtgattgcatcactgtactccagcctgggtgacagagcaagaccctgtctcactacaaaaaaaaaaaaaaaaaaaagtaaaagaaagaaagaggaaggaaggaaaagtcctgaggttgcctactgtggcacatgcaaagggcagagggcatctttttgcagcaaaagctgtccagttatagaaggcatcttggaagccttatgcccttgagtgcagcctccttggtgagtccctgagtcaggtggatccccatgatcggactctagggtttggcttgtgtttccgcaccagcaaagagttgctgtgaccaggaccgttatgtgcatgcagaacaagagtggcgccagagtccaaaataaaaccgtgctggagcagtgccagagtgcataagcacagtctctccttgtagccaaggtgggaaccacagctgggtaaagaaagggtttcagagtggagaagagtgggctccagccctgaccggatctctcctggatgagttcccattgtcttacttacttcaaggttcgatttttttcatccataaaatggaatgacaatgtctctgggggctgtggaatttcagcatatgttcaacgtgttatgagaacaaggatagaggcagtttacttgttcctatggagaaacaaggaaaaggaatttggggccgggcatagtggctcacacctgtaatcccagcactttgagaagccaaggcaggagaattgcttgagcccaggagtttgagaccagcctgggtaacatagtgagaccccatttgctacaaaatataaacatgggagaggtgggacactcctatagtcacagctactcaggagactgaggggaggatcatttgtgtgcaggagattgaggctgcagtcaactatggctgtgccactgcactccagccagggcaaaggagccaggctgtgtttctaaaaaaagaggaagaaagagagcagtgggtgagggggagagagatagagagagagaaagagagagagagagagaatgaaaaagaaaggaagggagtgagggagggagggaggaaaggaaggaaggaaagaaggaaggaaggaactaaagaaggaaggaaagaaggaaggaggaagttggggaagcacagcctgtgaaatttgggaaagattttttgcctcaaatcccggggcacttttccatgtcggatgtgaacacccagccctacttctgttgtgatccttagcattgaaacctgcctccccaagaagagaaatttttattttgagcattgagctattctagagaaaccactattaatgacgaaaaatcacatttgagccatgagcaacatcttgggcctttggtagtcccagacatgagacttggggaaggtggtttgggggttacttttccagggtaaatcccttgtcctccagaattgccattcagacataattaatattctccctgcttcttctttccagaaaaaaaaaaaacccaacacatgcttacacttacttgttgggcctaattgttgtccaaattagtcctactttttcagataaattgtgtctttagaaaagtgttgaaattgggtggagctcttgagcaccctttgtggccggtctttcaccctgacattggcatgtgtggtaccggccacccatgacacatctcctgccctcctgccctgaaaaggttcaaagtcacagacacactgaatcagagcgctaaaagggctatagaaaacctgcaataggctgggcacagtggcttatgcctgtaatcccaacactttgggaggccgaggcgggtggatcacttgaggtcaggagtttgacaccagcctggccaacgtggtaaaaccctgtctctactaaaaatacaaaaattagctgggtgtggtggcatgtataatcccagctactcgggaggctggggcaggagaattgcttgaaccctggaggtgaagtttgccgtgagctgagatcacgccattgcattccagcctggacaacagagcaagactctgtcaaaaaaaaaaaaagaaaagaaaagaaaagaaaagaaaagaaaagaaaagaaaacccacaataagtggggatgtgatgatgtaggttcaggttttctcacaggacagtcgactttgttaaggggagaggaaaaggggagatatttctgtaaaagtgtggttcagctgagagcttcccacagttaatgcagcgccacctcttttgctgtataaacttacacaggccccctaacctctctggtcattgtttcatcacctataaatatacaaataatatctgataacacctgccttgtctataacttgaagatgaggatcaagcaagaaaacagatctgaagacattttgaaaaatatgaaagctataacatattataataataaattaccatgtttattatgtctactacgcccaagctgaaaaattatacacttaaaaaaaaaattttcttttgaactgtccacagagccagggatgacacacatttctctactagttttctggtcctcatttcaaacatacatttgagctccaaagtcatcctgaattattatatgagtgtgcattataaaatcctgtcaactgctctgtgtgtttgaaatttttcttttctttttttttttttttttttgaaatagagtcttgctctgtcacccaggctggagtgcagtggcgtgatctcagctcactgcaagctctgcctcccaggttcaagcgcgtctcctgcctcagcctcccgagtagctgggactacaggcgcccgccaccaacccgggctaatttttttgtatttttttttttagtagagacagggtttcactgtgttagccaagatggtctcgatctcctgacctcatgatccacccgccttggcctcccaatgtgctgggattacaggcatgagccgctgcgcctggcccaaaaattttcataataaaatattggaaggaaaaatcaccttaactgaaaagtgcagtcttgcacatgtctggtggcaatacatctagttggggtctccattttggaaaataaataagtaaataaaggtagcatcactaaaatgcaaaaccaaacaaacaaaaaaaaaagataaaaaaatctgacccagtaaaacatgttatagtccagtgatgtttgttacagtgtaattttaatagggcaccactctccaaaaacagaagaatgttaatttgttaaggcacattgccttgaggagatactctccagtcattaaaaaataggtggaaagatgatatagcaatcttatgcctattaaaatgctccgtaaaaaaagcaacgaagagacaagttcttatgtactggttacagaagtgttaaatcctaaggaaaacagaaagagtagaagtacccaaaagagctgattggatcagggactgggattataggaagattttttattttctcttatgtaaatttttcctttgatgtggatatacactatatttactttttaaatttaacaaaagcaaaaacaaaggattttactctttttacttagtgtcatagaaggctttatacccagggccctcagctctgcaatgctggcaagaacagctcagctgagaacactgacctgactgggttgccaaatgcattgttcgattgcgcctgcagcaatgactttgaacacaatagttgccaggttaaagagtgcccgctgggcagtccctacccagccctgcctaaagcctattgttgcctccagcacttctgcaaggtgctcacatggccaagctttgaagttgggttcacagagcctgtttcctcagagcatgaagtttatgttggagaccacagacttgtgggggtgggagaggggaagagaatcgaatgtttcaaaatgaacccgaatcaaaatgatcccccagaaatgtgtcaggaagagctaaagaccacttgctgagggctggatgttagagataaggaaaccgaggcagagtcggggcatttattttagaaatcgagccagtggccaggtcccccagcctttgatgaactaacccctttcttccacctaaactgcttcacacaacagagccgtaaattgccctgtgttcccagagtcagggtcacatccagatgatcacagcgaaaactcctggcttctcaactggagctgggcaagacggcagagccataattcaagggcagtcgtgtgctgtgaactttgtcaaggttgccaccctgaaattttgcctctgcctgctccagggttgccaatgacctcaaattcccatttctggctcaggccacagacttcttggggagaagtctcggtactcatttgaattttggaaaaccttagattcttccagggtacttaactcaaagatttagcaacaatatttcttgaagtccttttatggaccaggagctgaggtggtaaacataaataagacacattctgacccaacaggaattcatggagacagaagccctgtagatatgcaatactactgctaatcagcatttgttaggcacttcctacttgccaagctctattctatgagctttttctaaagtaactcatttaatcccccacaaaagctctatgacacaggcactattattatgatgtgtatttctcagataaggaaatggagtcacacagaagccagcacaggcagctggctctagaccctgggatcctaaccactactcctcactacagactttttcttaatggaagagaaaacctcttcctgtaatcccagtgccttaagccaatcacagtgatgttttgggtgctttttcctgtatcttttttgcacatctttaacagttgtaataataaaacataataatttgccttctttttgtttgtgtcactgagatttatagcaagaacaacttttctatatcacctttataatcctcactttctagtgagcattaaataaggaacttaatcattatcctaattttgagaaaatgtttctttataaaaaacattgtaatgaacatctctggctctaaagaatgtttcttatattcgatttttctcaagcctgaattctcagaggtaaatttacagagacaaaatgtaggaactttttttttcttgttaattgttggtacatactgcaaattttcccccaaactgtactacaaggctgaatgttttgtcaccatctaatcacttatcaagcagagttttgaagaatgaataaagtatgtgagtgaacaaaaatataagaagagtccatgctgatggaagggagattataaacagaatggcaagttcatggaacccctggaaaataagcagggaattctgggatgtgaagctggaggaagcagagatgagatcgtgcaggggcttcctcacactccatgttgaagaacagggactagattctggagataagggggaaccctcccaaaggtgccaaagagagcctgtaaggtcaggtttgccagtgaggacagatctccatggaaggatgagttgggaggctgggctggtgggtggtggtgagaaggcagtgccccacaggaaacagaccagcagccactgaggagtctataaggaatgagggcagcggagatgggaatggagaagctgcgtccggccagcatggtgggggatggtttaaacgaggatggaactgactaggagggaagaattcagcatgtctcccacattcctgcactggatgtcacccagctcagaaacggcacccacatgaaagggaaggcttacagatgggtgtgggagggtggttagctgagcttgaactcggggcactgggggagtccctcagtaggaatacctgatgagaagtagggctaactgaggacctggagccaagagagggcctaggaaaagggcttgactagaaagctaccactgttccggggtgagctgaagctctgaaaggaacatggtgacccagggagaatgcgccagagtgggcagaaggtggacagaaatgcacccatttgccaacaggataggcgaggatatgtgaggggaatttggcaaaaaagaatgagcaggagaagtggcctccagatgacaccgtggaaccaggtgcagaaaaaaatatttttttaattactgaaaaatgtattctgtgaccacaggagcgagaaagagaggaagagaggtgaatgaagaagggagggagggaggagagagaaaaggaggaagggagggagaagggagggaggaaagaagacaaaaagaagtggccaatcacatcaaataaggcggagattggccaccatcccaagatgaacaatatttgacaatgatttcacaactccctgactcttagttttcttatctatatagtagaaactgttactctgtcttgaccaaatttttgtggggtttgattgaaaagaaaactacaagagggaaaatttcctgtaagccagtattttcaaaagtgtattttatgaaatattccttagggtgttgttgttacatgaatgagagtttctgtggcctcataaaattaggatgtgtgttaggtagatttctttgctgcatttcctctgggcctttaagggactcatatgcaaagtcagtttccaagaggggcatccagtgtttcccaaacacattaagctgtggaacctttttttcatggagcaccttgaggaatcagtgtctggaaaacccactctgggaaagacagtacaatgggtttaatgatgcccaccttatcatgggaggattggagtacataagcaaagtccctggcaaagggttggcagtcagtggatattcatttcttctttatatcaaacaatgaaagcaggggaatcattctagaaaaccaaagctaaaatgcacaaaaatcttaggagataatctttgaccctacattctgtagcctcttctgagaagcagctgtgatatgggttcagatatttagtctgcaacttactagctgtgtgaactggcaggagttagttgatctctctgaaaaatgatgcaggaataaaatccgataatctagtgtgtgccatcagttacttcttgctgtgtaacacatcactccacctgtcagtggcttgattaacatacatttacgtcacagtttctgttgcaaagcaggcctgcttagccagatcctctgctccatggtgtctcatatcaagatgatggccaagggtctcctctgaaagctcaactgggaaacaatctgtacccaagctcactgacgtggttgttggtaagagtcagtttctcaaggcctcagtcccttacaggctatgaactggaaactgccccagtctcttcctgccctctcttctctaacatggcagcttgcttcattaaacagtgagagagagagatagagagacagagagagaatgcactagcaagactgaagtcttgtgtaacctaatcatagacaccccctcaatgttcccatattctctttttcagaagtaagttactcaaaaggaggatactacccacggctgtgaataccaggaggtagagatcattggtggccattttgcagactgcatgtcacatagtgagaaaaatttttgcatggtaagtccctatagagtggctggctattcttattcttttgaaaatcctatcaaaattggttagtcagtagtacttgctaatttatcaccctagagagacaaaacatccaggaaaatgccagtgggggaagaaaaaacagaaaacagagtaggggacttgtcattggtggcctgtggtgtacaacttcttgagacaatcttagactgtgactgcaggatcccagaaggcccttgctccacagctttttaccctcaaggagccattcttagaattacaccactagatatcctacttttgaaaggcaaagataataacagctcattgttttaagcatttgacacatattaacccatttaatcctcagagctgccttgggagttaagctctattattcctatttacagatgaggaaactgaggcataaaaagatcacatgactagtgagcagtaaaatacacattccaatccaggctatgtgatcccccaacttcatcttaacctttagagtttatggtctttcaagatttggaatgcatcgtctctggtccctcaatgtgaattgattaaggaaaccagactccagacacgccctagagatttggggtgggagaagaatgagaagtaagagcagcagagcaaaaccctgatggctttgcctagaggcacttgcatccattctgcatgtctgtggatggcagctggccaaggctagctgggttcctgataaaaattatagggcgtcagggtcccggttacccctttgtgcgctcagaagaatttcttggcctctctgaacctcacagtagaaaaggaagtacttaaagctacaaaatccctaggagcctttcttatgatccagagtccacaaataactggggctgggtgaccttcagaggttgagctggggagtgagctgtggcccagtctgtagagatgacaatggaccttttcacagactgagggcgtgtgtacttgcagctcacagccaggacacctggcagcatgcatgcctgctcctgagcttagacaagcctgggccctgccacgtgagcttttaaggacacgataagataaaatgtcttcacatggcatttgagggaccttggttgtctccttactttctccacccttacagagagaggcaatttacagtgcagaaaacagaaaaaacttaagctttttttccaaatgagtcctggtggtcacaactcatagactatgaaagctgtcccagctctctccagcccagttctgaagacagtgatgatggtcttcgttaacgggtgagtttagcaagagacagaattctgtacacgtggctgaagaaataacttggatgaagagctgagaatccaagaccccagcccagattacccacttcatggcagaggagaggccggcagaggaagccaccagggcttctgccattgttgccttcactttggggccaattaaccactaagcctaattagctctgccaagaacaaaggccaggggcagggaaagaacaaagccttctccagggacttgaagttattctccaggcctaatgtttggaaagccagccagaaaggccttgtgtcctgcagaactggaatccagctcccatggggagccatcgcatgagttgtccatggcattctttgagatgaagaacatcgtagccacactcgcactggtggcacacacatcaccataatcatcctgctgccttgagacacagtccctcggttacccaacgtttctgtgacttctgagagtgattccagtgacatccagggagcagcagggtgtcagtctggcatctggaatcaaggaaatcaatagactaagtcttcctgctccaaatgacttccccaaccccaaataggcagcctgaattttaagtcagtgtcttctctggtgtttatatctctgaagggaaaagaacaattttaagaagttttctgacatcagaagctcctctctcttttcctaaacttgggagtctcagtttaattccaatttccccatttcctatctctgtgatcctagactagatgctcaacctctctgggcatcagtattattctatataaagtcagggtcatcacacaaattttactggtttgttttgagcaccaaatcgtataaagtatacagtgtgccttggttttgactgtttctgaatcatttctgcaatgattctcaaaggcattgtggccttgccttgtccagtaagttgagtaagcgtccaggtttcccaagtctccccttttcactatctgtctagtatcccccaatgaccctcactttgactcactcatgatcactggggataattgccagtatggcccagccccttacagttttcgccactagctggcttaccccacggagcaaagcgtgataacttggctgattcagaataacactgctctacttgctctgttcaattttgagacctgttttggaatttagacacttctggtaaaccatgtgtggggtctctgctccctgcatccatgcctcccacacttgggcctgaatggacctgtggcctcgattcatgaccctgcatcttccctcctgctcatcttgctagtgtctgcttggcttccccctccagcctcccacgctcagagctgattcctattggagattttataactgtgacccagagaattcagaggcttatagaggcttggaccagagaagggtcttggatttagaatttaagcctaagtcagtctaagataattccgtttttaccagctatgtgaatttgagcaagtcttgcaccctctctgagcttcagtttactcaactgcaaaatattttgtattatatgagataacatgctttggatgtgttgtattaaatgagataacatgctttgctctacacagcagccttaaatgttgctcaatacacatatatatgtttgtatttcttttctaagctaagcatttatttgactctattccctctgttctcattctcccctccagcctctgccaccagccacctaaccccaccaaaggtgccaatggctcacaatagtctgattcagtggccctttctcagtttctctctggatcttctgaaactgtccagcaccctccgtttctcctaaaggtctcctctcttggcttctgcctaaaacgttcttgaggtttctccattccctcctttctggaagacccttctctgtatctgtgtcagccacttgccctcagccttttctccatcacctgtggttccttccaggccccttgtgtccactgtctacccttgttcttatcacagtgacaactgtcaaggtcattgaggacttactctgtgtcaggcactgctctgagcactttgcatatagatatccatttcactcacaaataaggtcacagatcctttcactttccttttgcagataaggaaactgaggctgagaagggttaagtggtgtgcctgaagtcgatcactcagggaagcatatataaacaggctgtctggctggctcttaaccaattgtctctgagtgatctcatccccactgaaggctttttctaccatgcttccaacatctgccatgttggcctcgccagctcgacctttcaattagattctagacctgaatagtagttgccttcagggcatgtctacttggacggcttacaggtacctggagatgaatctgaactcattttctttctctacaaaccaactccaccctgtcttctcccacctcacccaagtcagacacctggaagtggcctgtgcctccacctcttatcacctctgacagccaaccaagccactagtgctgcctcttgaatgttcctcgcttctgccctctatgcttggtccctctgtcattgtctcacttcccacaggctccatttcttgctttggttcctgcaactcccctaactgctctccctgcctccagtaggacctcctgcaatttattgtcctcttcagtgcccaggtgctttttctaaaattctgtgctctttgcttaagactcttctctggttaatcattaccttagagataacatccacattccatatggtgcgatccaagcccatttatcatctggccctgctgtctctcaaatctgattctccaccacccctgaccccaccctctgctccagactaattggattgcttgagttctgtggataaatataaaaacaaccagcactgggtgctcactggaagctacacaaatggttcttttcatcattacaactatctttgatggagaaattattaatgccttgcaagtgaggcaactggagtccgaagaggtcaacacatttctcagaatccttcaaaaccattctgtctagattcaaaaactcatgttcttcaccaccacactctaggacactggctaattgctcaatgcagaccaccttcttcatcttctttcatcccactcggttcactgatttctttaaagcttagttcaaggctcagctctctggagagaagtgcttggcttttggcctctgagttgactcatgtccttattagtcttgcatttatcctacttctttcagttgaaaattccatcgtttataggatgcatctttgacttaacatcatctttgctgtaaaacaagcaaaaggcccactctggtaaatgtatacagtctcaatccatatctcactctatatatattaataccatatacatatgtacacaggatgactcctatgcaaataactaaaccctacattcagtctctactcacttgactatattggtccaatttccagttctattaggctaagcctctagaggaattattatctcatgttgatatcaacagtgtttgatacatagtagaagcccagtgatcattcccttgaaacttgaatgggtaaataataagtagcaagaaaagcagctagcagtttttgaagcacatgcaaagcaccaagcattgagctaggtgtttgccatagatcaccttattttaattgacgacaataacaacttatgagacagggagttttcttatctatgtcttacagatatggaaacaaaaatcagagaggttaagcaagtcacttaacatcctacaaccagagtgatacagaactaaaattttacaccagtttggccgacatcaaagtttgagggttttttttttctttcttttttttttttttttttttttttgagatgggctgtcactctgttacccaagctagagtgcagtggcaggattttggcttggaatctgggctcaagtgattctcccacctcagcctgtggagcagctgggactgaaggtgccagctaatatttttattgctatttgtagacatggggtctcgatatattgcccaggctggtcttggactcctgggctcaagcgatcctgaagcctcagcctcccaaaatgctgggattacaggcatgagccgctgtgcctaaccaacactaagctgcctttccaaataataaagcctctttcttgctcatcagaaatgatggtcaggttcttacttccctaaccttcctgccctccacccttaggccaaacctacacagatcattctagttcttcttctttttcttcttcttcttcttcttcttcaacttcttcttcttcttcttcttcttcttcttcttcttcttcttcttcttcttcctcttcctcttcttcttcttcttcttcttctgcttcttctccttcttcttctccctcttcttcttcttcttcttcttctccttcttcttcttcttctccttcttcttcttcttcttcttcttcttcttcttcttcttcttcttcttcttcgtcttcttcttcttcttcctttcttcttcttctttcttcttcttcttcttttttttgtcagtatccctctttttaaaaaatcacacaaaaacttgacagaaattcaagcatagcttgactagtatgaaaaattgtaggattagtatctcctttgacccatatgccacaatctcaatctattctaacatcttagatatgctgatggtgtttagtgaatgtgggggccaccttatcctctaggtctttctgattaaaactcagccagggttcattagtcttctatttttgtactcctttcatttgaagtctctcggaaaaaaataacagcaaagaaattgccatatataaacatatgcaacttcaatctatacttcaaaccatacacaaaaagtaaactcaaaagagataacaaactgaaatgtaaaattataaaacttccagaagaaaacataagagaaaatccttgtgacttagacaaatatttattaaatacggcatcaaaaacacatgtaaaaaaattgataaattgaacttcaccaaaagtaaacacttctgctcttaaaaaaacactgccaagaaaatttaaaaaaagaaaaaaaaaatgccatagactggggataagggcaatatttgccaaacacagataatgagcttacctagaatatgtgtttaaaaacatacaaacaaaccaattaaaattttgaacactttaccgaaaaaaatatatggacaaataagtatatagaaaaagatgcttaacatcatttgtcactagggaaatgtaaattttaaccaccatgaaataccaatacacccataatggactggttaaaaaaatgttgacaataccaagatatgaaactatcatgcattgctggtgggagtgcaaactggtacagccactttggataatagtttcgcagtttcctaaaacattaatcatacacctaccctattgcccagaaatgttactcctttttgcccaggagaaatgaaaacatatcacgtgcaaacttatatattcatgtttgtaaaggttttattcagaatcaaactgaaaacaacacaaatttcctttacatgatgaatggatgaacgttctatagtacattcctacagcagaatactactcaggaataaaaaggagcaagctaataatacatgcaataacatagattaacgtcaaattcactaagcaaacgaagccaggcacagaaaggctacataaatataattttattcatatgatactctggaaaaggcaaaactagaaagatagaaaatggctcagtgactacaggggctggcaggggtggtgggtgtgcaggcaggagtttgaccactaagggaagccagggaagttttgtggccagtgaaattgttctgcaacttgatttggttgttgattacaagacaatatgcattgtcaaaactcatgaaactgcaataaaaaaggaaaactttagtgtgacgtaaattccttctcaacaaaaattgcattcttcaatagttgaaccagtagtggtgggaaaatacaaggtaacaattagttgaacctttatctagaaacagatagatttaccagtatctacaactattctatggattaactagctggttacatttgacatagatttgaagagacatctaaagttcagaaacaataaaacatggaggaatgcctcttagaatcaagcctcttaaatacacaagttaattttgtgatgctcaatgcatactttaatgtggccttgtataggtctggtttatgaagattttttttgattctgagaccatgtttgccagctctttccaatcagcatccctgaaagtctggcgagcatcccttctatttcttcccctaagcagaacgggaaattattagggcagctcttgtggcggacagcagggtgtccatccgagtggatgctttccagcctttgttctcctttgggaattttgcaacggatggagaacaaatgcagcgtcagggctttcgtttcccaagctgaggtgagatgtgggcctcccttaagtgtctcaggtcctggcttggcaatgcacttgggcacggtgtgtctctgctggtcttctcactctgccagaagtggagggtcagccctgtccagacaatctgggttaaaagcacaatcgctgagctcaggacatgcatgtcttgcttcattccatcgtgaaaaatatccactcccaatatttcattcttagtgtaggaaactccacagacatgaacttggaaaatagttttcagagaattacaccttcgggggacttcttcctcttaagggttttattgaaggcagtgccttttgtgatgaaaaccaacagcaccaaggaggggagatgaatattgtgtgtccctgaagtgacaccttgagaagaacatggtattgtctgtgggtacctggctagggaggcacaacctgaatctaaccatgaagaaacagagaacatgaaatacagaacatgctgtttttaaaaggactatattcttcaaaactgtcaatattataaaatacaaagaaagggtgtggaaatgttttagactaaaagagaccacagagacatgacaatgtgtgctgagggggcaaaatgctgaattaacacctaattgagccaagttattgataaaatcagaatgctcatggtaggttagaaaaaaatattgtcattgttcagtttactgggattgacaattgtgctatggtcatgtcaaaatattgtgatttttaggaaatgtacactgaaatatttagggataaagagccatgatgtgtgcaacttactctcaaatggcccaggaaagaaatattatttgttgaggttattatcattattatgattaagctgttattattgattaaattgttaaattatttccaaataaaaagctttttaaaatgtaatccttaaagagtgtccctgtaaagatacttttaacactgtgatcattgtttaattacagatgatgggaagaaggaagaattaaaaatacggttttccaagccctgagaaaaacctctatagactggatccttatgaaaatgtcagttctaaatatcacttgacagatgtttttcccaggcttttattgggacggacatcaggccaactttctcccacagacaaggtcttctgtggtggggtaagtccgctgcagacacatgcctgccaatcatttttaacacaacaatctccattttccccaagttccttcaaataaggactgaacatttactgcatttgtgttaacgttttccctttttcactgatcgggttggccaagccctttttgtcgcttttattttagttttggggtacatgtgcaggtttgatatataggtaaattacctgtcatgggggtttggtgtacagattatttcatcacccaggtaatcagcatagtacctgatagggagttttttttttttcaccctcctcccaccctccaccctcaagtaggacccaggttatgttgttcccttctttgtgtccatatgtactcagtgtttagttccttcttatacttgagaacatgcagtatttgattttctgttcctctgttagtttgtttaggataatagcttccagctccatccatgttgctgcaaaggttatgatcttgttctttttatggctatgtagtatttcctggtgtacatttaccacgtttctttatccagtctaccatttatgggcatttaggttgattccatgtctttgctattgtgaatagtgctacaatgaacatatgcatacatgtgtctttatggtagaatgatttatattcctttaggtgtatacccaataaggggatttctgagttgaatggtaattctgttttaagttatttgagaaatcaccaaactagtttccacaatgactgaactaatttacattccaaccaacagtgtataagagttccctttctccagaactttaccggcatctgttattttttcactttttaatggcagacattttgactggtgtgagatggtatctcattgttgttttgatttgcatttccctaatgattagtgatattgagcattttttcatatgcttgttgtccatgtgtatgtcttcttttgaaaagtttctgttcatgttctttgcccactttataatgaggttgcttgttttttgcttgtacatttgttaaggttcctaatagattctggctattagacctttgtcagatacatagcttgcaaatattttctctcattctataaatagtctcctttccctgttgatagtttcttctgggcaatccctttttgaatatagtcagagagctcatcaattcatgaccttgggagtcctaagattttcttctctttcccatagtgacttgactactcactaatatgtggagtggaaggaagaagaaattaccctagtcccttgtttttgtagtcctaatagatgtgttcacacaggaagagagatatgctggttcagatgaagtttgggaatatggatacaattccattcttggagcaattaccaaacctcaggagattaacacactaaaagtttaattatcacactcacaaaggtcagtaatgattgggtggctcttctctaagtgatcactcagaaatttaggttccttgacttttgtttgggtaattttcactttcagtacgaaacctgcagttgccactgcatgagaagacagagtgggtaatatagggagatccacacataggttcagaagtggcatacatcagtttagcccacatcatacaatgcaacatcaacactcctccatcaagattggagccagccaggcacagtggctcatgcctgtaatctcagccctttgggaggccaaggcaggcagagtgattggatccaggatttcaagaccagtctgggggacatggtgaaactccgtctctacaaaaaatacaaaaattagacaggcatgttggtgcatgcctatagtccccagctacttgggaagcagagatgggaggattgcttgagcccaggaggcagaggttacaatgagccgagatcacaccacagcactccagcctgggtgacagagtaagaccctgtctcaaaaaacaaacaaacaaacaaaaaaacagtcttccttcccctagaacctcggtgggcctttacaactgcctcaaccagtagaacacggtggaagggacactgcattacttctgaggctaggttataacaggcaatatggcttcaccttgcctcactctctgtctctgaatgctcacccttggacccaagccagcagcctggatcaactggtagacatgtaagtgaatgagcctctggcctttaaaccttccagaggaagtcctagatgtgatggagcagaaacaagccatcctgctgtgccctgttaaatttctgacctacacaaggataagaaataatgaatcattaacattgatttaggctaacaagttttggaacaacttattacacagtaatagacaagtaagacaatgggcaccttgctaatctctgcctcaattctgtagcctctctgcagagagttgctcattaggattcccagactcccgtctgagagaaaaatcatcaccactgctatcaccaccacagttatcatcagtcactgcatctgtcagcacctcagcaagaaatgcagatgatactctgaaaaggggaaattgcatagtgcttttgaaaggatttagggaacttattagtgacacacactaggactggcaacaaaggggggctgttaccaccctgggccaaatgggcaagaagtggtcaccagttttttgcaggagctataactataggagagggactagctgaaaagagccaagatttttcaagtgcaaactgagtcacagcaaagagagacctagggaaataaaaacccagactctcttttctttcaatctctgacttttcgttgatagtttctattggctatacccaatagtaaaccaaagggcacaggaggctggttgatacagtccataaggttcagcctcccagcagacaaaccaggatgacaaaggtggagagtagacctggaggagtaattatgaacattttccacattcatcatcatcaccatcaccatcagcattgtcattattatcattatcatcatcatcaccatcaccatcattgtcaccattatcaatattatcaccatcaccaacatcatcattgtcaccattatcactatcataatcaccatcaccatcatcatcatcacaatcatcaccatcaccatcaccagcattatcatcaccactatcatcatcatcttatactacctcattatactacctcatgtgcttactacttctgaatttgcaaaataatttctcatgatttttctgatatcatcctcagaaggtcttccttgctgtattccctgagtctagatgagagtttgtcacataaatggtgcttagttcaatcccacaaatatctttgattgcctactctatgcaaggcttcaggctagaaacatgggacagagaataaaattccaagatgaatatgttatgtctcataagataccaagtgttaggaaggcttaatcagaaaacccttcagaggttgtggtgttcaaggtccctttagatgagaggtagatctcaacaggtgtacttaggagaaaatgctcttccatgccctagaaaccatataaaataggtttaaaagatgaggaaaggctgggtgcgttgactcacacctgtaatcccagcactttgagaggccgaggcaggtggaccacctgaggtcaggagttcaagaccagcctggccaaaatggcaaaaccccatctctactaaaaatacaaaagttagctggatgtgttggtgggtgcctgtaatcccaggtacttgggaggctgaggcaggagaatcactggaactcgggaggtggaggttacagtgaactgagatcgcgccattgcactccagcctggatgacaagagtgaaactccatctcaattaaaaaaaaaaaagatgaggaaataggaattatgttctgggagcagaaaatatttcagttttactggaacacagaacttacagagataaaatgtaagttatgaaattgaagaagcagtgggtcatataagtcttggaagccaagatgaggcatttatactcatcacattaggtacaaggaagtcattgatagtttttgagcacaggaaggaagtattctaactgttctttcacaatatcaggtttacagtaatagataggataaatgtggtgagcacagacatggtgtgggggaaattatttataggactactgttctagtttcagtaaaaagaacctctaaagggttgcgaggggcagaaatggaataaaaggatgtggcaacaggctgacagtgtgagatcgaagaaagaaccaagaaagatggctctttttacagccagtcacttctgggcatggaggatgccacttgttcaacatcacaaggatttatcatgcaattgttttgtgccaggcactgctcttgactatgtaaacacagcaggaagcaagacagaaaaaacacaatctctctttccacccaggttccataagagatgcacaagcaggaaattcaggactaagagattgcacacgggttttcctctgcctgaaatatccttcctcttatctcctttacctagaaaacacctcctcatcccttaaaaccacccaactccccaatttaaacatttgtccctgattctttcattgaactttgctcattcttccggcacttcccttgagagacaactaggtttttttgggtaagaaaaacttttataatcgtagtagcttgtgaaaagtctcttggaggttgtgttgaaactatgagttcaaaccattagtaagtcaaaaatctgtaaaatttcatcagtttatcagggttgaagctcattatttgtcctaagagtttggaaacatagaggaccctgccaaccatccacctcctcatgctcaccccagatggaatcccacgggtatgttatgcagcatgatgcctgtgcatgcaatctctgggcctgctgggtgatatttgtccctgtcattctgttctcactcactggactaaggcagcaggtgcatgtgggtctggggcacatggacaatcagcacagcccttggggtcaagctgacttgagttgaaattgaggcttttctacctgagcctcaaggccttggacaaggatctcaatgctgtggagcctcagctttttttttttttttaacctgttaaggaggaagaagaaagcctgactctcgagttcctaggagaattaaatagtgtgatgaatacaaagctcctggcccattgcaggcatttaacaagtggtgtgcttttatgtgggtcagataggattttcacaaatagcaagggcattctggaagttgaaaaacactctgatgacaacaataacctgcaggctatcgggcatatgtgaaaagggaagaaagtggttccagtggggaagagggcagtggaaggtggagagcctatgacagtgctggcaccagccaccatggcactatatcctgaaaatttagttatggcctaggtagacttttcattacttaatgggcaaaaaatgacaaaatgcgtgttgaagtttcattcatgcattgattcaacaaatatttattcagtgcctactatgtgccaggcactatttacaacagtgaataagacagagaaaaccattgctctctggaagatttcatcctagtgatgggagacaaataagaagcaaatatagaagcaaaatatcagagtcgtgagtgctttgaggagcaatgaagcatgggtgcggtaagttgagtggagccaggactgggcctcatctttcagcaggctcggggacccccacgacccttctgaacctgaatgttctggtggacagcagccaccgcaaagtctgggcccatcctgcttctttcccagtcgtggtttgcagctagccttcgggaatcagttcccagtcatcacacatactttccccaaaacttgcagctttattaaagaaaatcttcatgacaggaaaatacgtgtggctatggaggagcacaaataaaaatttaaaataaattaaaaactgaacaagtgtatttgtccctggattccagggaaaattccagacgcgcccacagccggtggcagcattgatcctcagcccaggtggtcaacaaaagaagaactcaggcacacttccctggggcaggagtaaaggaacacactgtgcacacctaacaagaaatgacaggcaggtgtgagacagaaggttccagaagtagagcagaggcaggacacaagatggtccaaggctcagccagagggaaggttacctgctgcatttgggtctacagtccttggtcctatagctgtcagcagaggtgctatattagtccgttttcatgctgctgataaagacatacctgagactgggaagaaataaaggtttaatggacttacagttccatgtgtctggggacgcctcacaagcatggcagaaggtgaacagcacatctcacatggcagcagacaagaaaagaaagagagttagtgcaggggaattcctcttattaaaaccatcagttgtcatgagacttactcactatcatgagaacagcacaggaaaggcttgccccatgattcaattgcctcccatcgagtcccttccacaacacgtgggaattcaagattaaatttgggtggggacacagccaaaccatatcattccgccctggcccctcccaaatcttacatccttacatttcaaaactaatcataccttcccagcagtccccaaaagtcttaactcatttcagcattaacttagaaatccacagtccaaagtctcatctgagacaaggcaagtcccttccacctatgaacctgtaaaatcaaaagcagattagttactttctagatacagtgggggtacaggcattgggtaaatacactgaggatgccatgaggcgtccccagccacatggaactataagtccattaaacctttatttcttcttgcagactctcattacaaatgagataaattggccaaaacaaaggggctacaggccccatgcaagtctgaaattcagcagggagtcaaatcttaaagctccaaaatgatctcctttgatttcgtgtctcacattcaggtcacactgatgcaagaggtgggttctcatggtcttgggcagctccacccttgtggtttttcaggttacagccttgctcctggctgctttcataggctggcattgagtgtctgcagcttttctgggtgcacagtgcaagctgtgggtggatctaccattttggggtctgaaggacagtcgtcctcttctcacagctccactaggcagtgccccagtagatactctgtgtgagggctccaatcccacatttcccttctgccctagcagaggttctccatgagggccccacccctgcagcaaacttatccctggacatccaggcatttccatacatcttctgaaacctgggtgaatgttcccaaacctcaattcttgatttctgtgcacccacaggctcaacaccaggtggaagctgccaaggcttgaggcttgcaccctctgaaggcacagcctgagctctatgttggcccctttcagccatggctggggcagctgggatgcagggcaccatgttcctaggctgcacacagcacggggaccctggacctggcccgcaaaactactttttcctcctaggcctctgggcttgtgatgggaggggctgctgtgaagacctctgacatgtcctggagacattttccccattgtcttggggattaacattcggtttctcattacttatgcaaatttctgcaggtgacttgaatttcttctcagaaaacaggattttcttctctatcacattgtcaggttgcaaattttctgaactttaatgctctgcttcttttataaaactgaatgcttttaacagcaccaaagtcacatcttgaatgctttgctgcttagaaatttcttccaccaatatcttaaattaactttttcaagttcaaagttccacaaatctctagggcagaggcaaaatgccaccagtctctttgctaaaacataacaagagtcacctttgctccagttcctaacaagctccttatctccatatgagaccacctcagcctggaccttattgttcatatcactctcaacagttttgtcaaagccattcaacaagtctcttggaagttccaaactttcccacatttttctatcttcttctgagccctccaaactgtttcaatctctgcctgttacccagttctaaagttgcttccatatttttgggtaacttttcagcaacaccccactctattggtaccaatttactgtattagtcaggtttcatgctgctgataagacataactgaaattgggaagaaaaaaggtttagcggacttacatttccatggggctggggacacctcacaatcatggcagaaggtgaaaggcatgtcttacgtggcagcagacaggagaagagagctcgtgtgggagatttcctctttttaaaaccatcagatctcatgagacattcattgtcatgagaacagcatgggaaagacttgcccccatgattcaattacctcccactgggtctttcccacaacatgtgggaattcaagataagatttgggtggggacacagccaaaccatatcaggcacctctgatggcttcttgcagaccctctctggaggagcactcaagaccaagaagggcaggagactatcaggaccacttgagaaggctgctgcttgatttccccgctccatgctagcgcccttcatccatgctccacacagaagcatttgcactcaatactcctcacacccttcaccttccctccccactgtgcctacccttacccctcacccactctgaagtcaaattcctgaggacagcctgtctccctggcttttccttcagcctgacactcagtccaggagatgcttaaaagctgggctctgtcatgttgccttaggcaaaccatgcaggcaactcacacttcagctccctcttctgtaaagtggaaatgctaattcctctgaggcatttgtgaagaataagtagaaaactaacatgtaaaggattcagcatagtgactggcacacagcaagtggtgagcacatgtttgctattagggctgatactggagctattgaattgcttgggctccctgcatggtgctgtcactcacatacctgggccatgctcagtgccacccatcacctggcaggggcttcatcttcagaactcaaaggctagcttcctggaccctccagcttcacctaaatgcttccctttagttatctcaggtaccagatcacccttctagcatagcaccgtccttttcaaaattgacagtatctgtttatatatctaaaccttccctccataatataaactccagaaggtgaggaaatgtgtctgatccatcttggcatctccattatggagcaaattgacttgtattgagggacacagagagatggacagtcagagggagaggcaaagctaataaaattcccaatttattttccaccaatacccccctatgcattgttaataaaaacacacacacacacacgcagaaacacacacacacagaataaataaaatgtatatatttccatcttgttccaagtaaatcattccatatcctcagccataacattttaataaagataaaattaatttaaaatagataatttagttgactcatgtgcccaaatacatagattttgcaagtagctattgtgacaatagcagctaatatttattgaaaacgtactatgtgccaggaaagatgctaagggcaccatctttttaactaaattggtcatcccaacaagctgcaagaggatgttgatgtcctgattttatactttgtgaaatagatccagagatgttaaggaggtgctcaaggtcacacagcatagtacagcacttgaaattagttttttttttctctcttttgtgttatgagttgaagtggatccctaaaaatgacataagccccagtggtccaggcacagtgccagctttatccagcatagtgggcactgagttgggtttattttcatttaaaaaatggacaagaagcctgggcaacatggtgaaaccctgtctccacaaaaaatacaaaaattagcccagcaaggtggcctagggctcttgtcctggctacgcaggaggctaaggtgggagaatcactttagccccggagacagaggttgcagtgagctgaggttgcgccactgcactccagcctgggcaataaagagagaccctatctcaaaaaatgaataaataaatagttaaaataaaataagataagagaggttgaatgctggtttgaggccacataccttagaggactggctggttcacagacatcttttcactgcatgccaagctaagtcaaataagctagagtgacagtagaatcccaatctatgacttctggtgttctaggtcttgtaacctaagcaggaggttggaagtgggaagatgctgaaccttcagggaaggtgttgtcagcgaggaggtcggcatgggatttttgtggtgaggaatgagactaaaacagtagtttgagatcaaatggaggatggtggagaagtaagtttagaatttctttttctttctttccttttcttcttttttgacaggatcctgatgtgccacctaggctggagtgcagggacacgatcacagcttactgtagcctcagcctcctgaggagctgggactacagacacttgccaccatgcttggctattttttttttttagacagtgtctgtccatgtttcccaggctgaagtttagaacttcttgctggggaaacctcttatgcaggtcaatcaaggtgctgaacatgaacgttttaggtaaagatggttaaggagaccgacgtgacagagcaaatattacaaaaggagagctgacagtacatacggaaccttaggagatacaaaggggtgggtgagggaaggattcattctttagagatactgtgtctgaggggatgatggggcctccaggtagggaggtctggcgagcagctgaagaggggaggaaggcaggaaatgtggagtgcctcctacacagagctgaggactgcagagagagcagaggaagtttgtctgctcaagatggagaagtcaagagaaagaagagcatggggcttaatctgggcccagagctgctccccatgcatggatggaaggaggctgggcagttcattaaggatgtgactgcagcttcagaagaaaaccagcaaccgcagcatcatggaagtgtgggggcaagagagcttcaaggagaggctgatcaaccatatccactactgccacagtcacagataatgtcactagagagatggccactaggtttgtcattcagaggtcaacctttttcagtgccttttggcaaacaaaatggtagagatttgagaaaggactctggatagtatcaagggagtagaagcatcctgtacagaggacttcttcaaccaggtcagcagtcaccaagaggagggagattgaggagagtctagaggaagagcatgtggccccaatggatcggaagatggccactccagactccagtctatctctaacattaaactcctgagagatttggggcaaatatcttcatgaaggtgagcctctattttctcatttgtttattttggaaaaattaaagagaatagtatatcacatcacacagttcccacaataccagcccatgccaatcctgattcatcactactcaacacgctttgtcctcccactggtttatttgcaagttcattcgagatatgaaatcatttcttccttaaataatcttttgaatttttctccaacagatacagtcatttaaaagtataatttgggaggctgaggtgggtggatcacgaggtcaggagattgagaccaccctggccaacatggtgaaaccccatctctattaaaaatacaaaaattagctgggtgtgctggtgtgtgcctgtaatcccagccacttgggaggctgaggcaggagaatagcttgaacccgggaggcagagattgcagtgagcagagatcatgccactgcactccagcctggtgacagaatgagactccatctcaaaaaaaaaaaataaaagtatagccacatagcattactacatctaaaaagttaacaggaatttctgaatagcacctaagtgttcaaagttccccctttttctcacactatttgagggtaaggcagagttgctttattaaaatcaagatccaaaggtctacacatgatccacacatgacctttggctaacatgtgtttctctcttttacatctgtaaattttctctctctgtgtctttcttcttgatgcttatttgttgaagaaacaaggtaatatgtcctgtagagtttcccaccatgtggatctcactggtgccatctacatggtgccatttaataggttcctctgttccctgtatgttctgtcagctggaagttagacctgaggattgctgcagtccatatttgatttttgtcgaaaaatgttgtgtattttctaatgcatcacgtatgtacaagtttctcatggtctcttttttttgtgatgttcagatggatgtgtgggttcagagaccatctactcaatcaatccacagtaaattcccaatacttttactatgttgtcaagaaactttaagttcttactatcttacaaaccatctaatccattttgactagcagaaaattcaagactctacattaagtagatcaagacatacaaaataccaatgtcttaaatataaaaattatatcatttccatgatgaactatggtcaatttttcaaaaatggaagcaatgttcagaatgtggtctgtcaatgaaatggaaataataagtatggaatatctcaaacaagcaaacaaacaaaaaaacggatattcagccaggcatggcggcaagtgcctgtagtcccagctattcaggaggcccaagctggaggatggcttgagtctcagaattggaggctgcagtgagctatgatcacatgactgtacttcagcctgggtgacagagagaaatgctatctctggaaaaaaaaaaagtatgaatgattgttgtggggggagcagcttgcacaaactatccgtctaggaggatattagcagatccctgtagacgcaaactatttctaacaacacaggaggtgctagaagctgatgctggaggttactgacagtaactaatgtggagattttccttatcataaagggcctgcactagatgctggcagagagaatggaaaactaggtgtattttttttagatattccatacctattatttccatttcattgacagaccacattctgaacattgctttcatttttgaaaaattgaaggaagaactgaaaggatttggtaaataattttaaaaagagagagtggagatatcaccaataccttgaccaactaactcttaagtaacaaaagaatgtgaattgggagtttcataaaaatatgaaaaatatcctgcagatttaggccaacggacaccccaccttgtattcctctaccttgtggataactatcatggtctgttatataaccccagaaatttccctaagccatcagaatccacccctcatctctaaatattttttataacactgctcataaataagaagtagagccattgcttggaggtagtctataaagcagaggcatggggcaaatggcattttgaagcaaaacaaaaagttttcaatttatcaggaaagaaaaaaaaaacaaatcagaccctgcataacaaattggttatataaatactctgcggttgggagagctgccaatacccctgcacatacagataattttgtaggagaaagtaaaaattttgatcaacaccagcagagcctaataggctggaagcctgaggcctgacaaagaggcaggaggcacaccagaaaacccctctaaccttggaggtgagaaagaaggcaaagggagggaggaggcgaaacctagaaataaagatctgggagaaacaacccaatcttggagcgagccccaaaaatgcttgttagaagacccacattgaacaaaagatctaaatctcatcattttggtctaagatttcaatggagaatttccccaccctcacccagtccctgccaacctgttgttacccatccagcaggacaaggggcttaccgctgccagctgcctctctaagaggaatttcaaccacaaatgctggcatttgaccagagacggcccacatgggcatgcagaattaggtcttcattggaataactgagcagaagagctggggcctggaaagagacttcctggacatcccagggcccttgtagtggccaggccactgtcttgagacctcaggttctgtccaggagggtactgtggtctggtgtggaaggggtcaatatttcctataaagaaggagtgttttaagggtgataagaactcagccatctcttccctatttaagaggaagtcggtgtgagtccttgggcccagagttacatggaaaaagatatcggttcttgtaagaaagtaggctttgcaccacagaaggaggcatttgcaatgcagagaccggaaaggagaaaagagggtgacgtgtgctccatagagagcagcaggggagcagatcaggatccccaccccttctcctgagagtactcgagcctcacttgagacaaattcttaagataatcataaaaatccatagcaactttgttgatgttggggtttgcactgagattccaaatcaagaggctgggcaagcgaaacaggttcggatttctttcacacagcaggtgaaagaatgtaagaactcctggtcaaagtcaagagcccggcactgcctgctctggtcacatctattctgccccacatttctataacaggaaattaggccaaaatgcatctccagcatcattcacttccaaaatgctctccataacaaactttttcacaatggtctgtgaaattgtttgttctgtttatcctccgatggaggagagaaactgagtccaatagatgagttggcatttccaagcctttcacccatgtctggggccatgaggatgaaaatgcacccacacctcaagtaaatgctgtatcagtgtttcagcacaaaaaagaataagatgcttttgagagtgtgtggcaagtgatctgagtcatgaggtctccagaaccctgatttgaacagtaaaatgaaggaaatagccaaaggcctctcctatgctgctcctccggtattgactgcctggacagcactacagccttggggagacagatgctcacaagacaattctctgctggaaaccggaaggctgtgtgtgtgtgtgtgtgtgtgtgtgcgtgtgcagcctcagacaggtgacctcggaaagcaggagtgaggccttggggaagttgaggctggcaagaaggaaaagtcaactctgggaagcatcattaggctggtcatggccacaagcagcaggggctccagccagccagcaccctgtgaggagccaagtggaatgccggccagaagcatccccaggggagcacaggtgagggaagcacgtaccccacccccagggcttggggcttgccctgagcgttgactttgtgtcactctggcctgcacacacacaggccaggcacatggtgcctcccaagagcagaaatcaaaattctatgtcaatgccaagtgcttcttggccgagggtaccgttccccatggccacagcagggatgccaggtgagactagaggaacctaagcctggggggtccccaaagtcgggtccccaaagtcgggtccccaaagtcatcacccaacaaatcttttctttcttcttaaaaacacatgtactcatcattctggaagatgccctgacattccaagtttggcctgcacactctgttctcacaccggccctgccatccctactacgctccatcctctttgctccttcttgtctagcagaagggagcaggagcctgcctgccagctgtgtctcctaaggcagccctggctgggcttctctcccctctgcctgtaaggcccaatgttcagatgtcaagggtctgtctttttatagaaacaaagagccatgcagaatcactgtttttgggattgctgtccttgcagctgtgatgaaagtcgatgactttccaatcatttcctctaacttctgaagggctggagtagcaaatgccccttcccctcttttgcatgtttgcaggatgggagtttcagatgttgtttacctgccagacgtggagtggaggcttcccaaagcagcatgatgtacccacttcggggccacatggtaacggggactgagagaacagggcatcttttctaagacggaccgagccaatctgagcagtctggccctgcctgcaaagtctgtgtggccttaggaacgtaatttaacctccatgggctccatttgtttctgtttgagaccctcttcctaattgtgcccgtggtgcctagttcataatcagttctcagttcatggtggccccccttcatcccccaaatgtcaaagtctccagcttcccatttcccttccattcctgactctaagtccttaaattgggtgaccattaatattactgctaggagcattttcagagcactttacatttacagcgttttttccttcccaaattgttctcggtcctttcttcggaataggtattaaaaacacctcattggacaaattcctttccttagaagatacatcatgaatatggttggagaaggcaggatcataattcggagaattcagggttgatttcccttaccttcctgctcttttgctgtaaagtccggagccccaggaagtgccgccaaactaccccttattttccctccaagagcagggcagaataaattgctattttgtttggttttgtttctcatatacaaggcctcccaggccctggaacctaggctactggcattttaattaatgttaatgactgggatgacctcctccccattgaatctgagtaagggaaataaacaggcaaacccgaacaaagccatgtgcggatgtggtaccctctagaaaagctgacctctccgatggctggccagggtctctaaccaggcccatactccttcctcatatacccccaattttgaatttttttagttcaaatagaaattggttgcagggggaagcaggtagatttcctcctttaatacataaatgattctgggtcctcggaatcagaatccccactttcttattactaggagcatttttactctgagatcaatacaaccagaatgtgtccaaccataactttacaacaacagaaaagatacatagcaaatgccttcaaatacctggaatctggccttgaaatcgacctggcatttaaatcgacatgtatatcccagttgggtcaaaacatagtcaaggtttcccccagagatactctgtttcattttccttttcaagtaaatttctatttttccccccaacctttacagcttaagcgttttatccagtttaaacgttagggatttaaattgctattttagtggaagaggcttgattaaaacctgtgtcctcatcaaattattggacagtggttcttgggctctgtttacattagtgtcaaccttaatttaaattccgcataactatatttgcttcgctaaatgcattcaccaggaacacaccacaaattactttgcattatgagccgagtctctttgtctattgcaaagtgttttgaaattagcaccataagtaactagctgtaagtgtcactccatctccttaatgcctcattaatcaaactccatggcagctgatgtgatgtccaagcccctaacatataagatcagtatcatttactccttgcatttgaccacggtctttaaacttgatttgttatttgtgcatttgccctcgctggagctctgctcctccctcagtggcctcccaacacgtggggctttgtatggataccagttgcatgtgtactctttgcagaaattggaaataaaaacccatttcccatgttgtggaaatgcatagcctcaaagtcaggaaattcttttaatggaagaagagttccacttattcccctgagttatccacagtgattccccatgattttcagattaatgctaaaatgccataatggaaaaatttccctgggcaagtttttctctatgtcaagaattagagaaaggaattacgttcacccaggcagactacaatttccatcttggcctcagttccccaaaaaaccagatacatttagtctaagcacttaatcaggaaaaaaaaatgtatttttcccttattatgtgatacgaattattctgtactaaatacaaaattttagaatttatgcttgcaaagaaatacagaacaatttatacttaataattttattacatgtacacacaaaatcatagcaaaatatgatatattttataggatttttttgtcttttcatgatgccatcgaatatttgcaaatgcctaaatggaaccctttcttcattctccacacaagtccaaaaacacaaacacacacgcacacacatacacctatacacatgcatccttttaaccaaaggtaatactcactggtgttaaaactaacagctctactggacaatggcttcatggacattttagaggcagtcttaagtctgctgtgggcacaggcatgtcggatatgatttccctgcagggatgccctctcggtggctgtgggggatgcttgcggcccctcgcctgccagcgctgagctcagcctcacagtgagccgagatgaacaggtgctctcttctctggcggcggcggcacgtgaggtcggctccttgcagaacagcgtctcagtgggagacctttagcttcacggcctttccttctgaccacccagcaggaaaaatatacgaaagcgtttttttctgccagttttgtcgatgagacaaaatacaaaaacaaaaaaacacacagcattaaaactttgtatttcccacaggtgggctttggaaatgtttaccacagtcatagtaaaacactagttttcttcggaattaaattttttgcctttccaccttataaaaccattcaggctaaataaccacattacaatagaattaaacattgaagcctggctcccgaaatcaacatcagtgggaaaacccactgattcggaacacacacccaacagtgcaaatctatgttagattttgaatttaatatcaacttaatgtgactgtagtttatattattatcacatctactttcttttatatttaaaataggctctgattttagaagagcaaatgtaaaaaatattttgattatttgttgatgacatttactctgattataggtgtaatctatggcaattccaaaagtaccttgtatgtcccatctccagttcatcctgcttttaccctgagtccagcaacctctattcattaggattctgaacaaaataagcatgaaaggggaaatccaaaataatattcagaagtggcaaatcataactgaacatagttttaaacttgacaatttaaaacttttgcctcttttcagcagccagaagaagtctggttattttaagtcaaaatctctgccccaaaacctcctttccctgcactccatgaacacctctctcccttttccccaaaggcaacattttggcttggcaagcaatacacatcaatgaacccttccatttaaatgtcccacaaagattgcatccgatcacagcttgcaagaaagaaagaaaggaaagaaagaaagaaagaaagaaagaaagaaagaaagaaagaaagagaaatcagacataggcagtgtcaaatgtcttatacgtccgccccctctgttcttccattctctccctcaccatcctcttgtaaaataaaagagagccgagcataacttgttacagtaaaggcaccccgagatttagggggataagtacggcctacttgttatctgcaatgctgcagctgtgcttttatctggccaaaggagacaggggacaacaaaagatcccaaagaagggacagtggacgcatgggaaaaccactaccccagcattgtggtgcccttctgctgagcaaatagttcaaactgttcattcccatcttctattctctccctggtacattgtttgtgcccttgcatttcattctgcaaggaaggttgctctctgggcctataagcaaacagtccagaaaagggctagccatcctcttctcttccccggagaactagcatttttatttcggctccaagctgtcaaagatctggagagtttatgtcagtgtcctgaattaattgctttaagctggagcaagctccacgggctaccaaatgtccaaaagatgtttattaataacatttcctccaggatcatggctccaagctgtctctgggtggtggcttttctatgctgccaccctctcacccctggcctcttaatgctcaggaggggattgcctctttcagtcatcatgacaaaatttagaattgcccgggatgaaataaatatccacctatgtcacagggtgtgcacggcggatatctttgtcctgactcagaaagagttatagaagccctgtgtgcaacctacaagtggtctgggggagagcaaaaagcagccaggacccccctctgtgaaagctcatttagccaatacaattagcaaaaggagcaggagaaatcggggctttggcttcccctccctacctcctcctccaaaagaaaattcagtgaggctgacaacacaatgcattttgaagttttcctggtaccaaaaaaaagcctctttaatagaatgaaataataaaccaatttatatactgatataagactaggatcgtgaatgccattgtgtaattttccacttgacttttcattatctacctgaacaaaatcaatctatatgtatgggatcaacatacaattccagagataaaagctgaaaataaatgcgctttgcatatcctggagataaaagacacaatccttggtactgccttttcttctccagcagatgcatttataaaataaattgttgtgtcaaggaaaaagtgagacgtagcagtgtatcttgagtgtggactcctttgctggaaatattgatcctgcaaatgaacagtggttaataagtaccctgcagacgatatcaggtcttttgccctagtttacccagagtgcagtctgggtcaatgtttctcccaaccaaagctcctcacctccaaaaaaaaaaaaaaaagacttcccctattagcatggatttaaagctgaggacttcaagggctttttaaagccactctacagagacaaagcacattgaaaattcacattacattagaaaaccccatgcagcaaacgcccagcttgtgaagcacacagtcctcaaaagggaaggagagatggttccatgcactttagggttgacatttattactttaaacaggttgggttccattccttgtatgcctttctttgctccaataattagcaatggtgctaaaagtagtaaagctctctccccattagccatgccatgggtcctccttaattccctttttttggaatgtgtcactgaatctgcgtgaatctgtgtgccctggtgggcagatggtggggcattgttgagggtgctgtggctgtttgtgtgccctgttgtgttcagggctcttcgaggaaagtacacccactctgccctcccagggtgggctcaccttggttgctgttcactttcctgtaagggaggggttcatttccaacgttgtatagatagcaaagagaggcccacaaggcatgggaccatctttcaccccaaacaatcactctgagtttgtgaatattttccggtcatagaaagagatttccaaaaattagctactcttcattgtttattcattgttagattcagtaacctcaggggagcttaaatatctaccatggcagcgtgattgtcacagcttcagctcttagggcaggacaactccacacttgtatattttaggatctttgcattgacaaatgttaatggctgttggtctattggttcagcaagattttgcaattcctgatgttcacagacctccttcccttctcctgggctctgtattcacacacagcacccatttggactgggaccattgcctcttgattagcaaatctggtgctgtgctccactcctcagtttatatttgttgaaaactctgaggaaagtgtccaggagcaatctgatgcagtgtcatggcctttggggaaatgcttgggagggtcaaagctcagcctggggagaagctcatgtgcttttagtcacagaagactcttaggacaatcagtgtgctttattcatttcatctttttgttccagtagctgtaaataagcaagtctagagaaagtgtaagatgtggtcaagaagagttatgcagtcattagacttttgtttgaaaagagaacaccttcctgaaggcatgttttgaaaaggtcctatattttcatgacagaaatgatgccttgaatggctacagctttcagccttggtgagccccagccttatttgatccatattttaattactctgtgattcaaatctgcatcgtagggaatcagtacagcgacataagagcttcaaccagcataaagaacattttcaggagctttgtaccccttaagttccctgaggaaagacaacacaccagaacaggtgtcactatttccacagagaaacctgctcatgctggaaaatgtcttgctaagtggcctcagaaccatcttctcaggctggaacagtgctccacccacatgcagaatcctgacacagtggaacgcagcccatgttgatgaaataaatatttagtaaacaggagaaactgagtttttcaaaaaggtattattataatgtttttagtgatcatgtcttagttgaaccatcttgatgccatttcctagaggaagaaaaatgtacagtaagaagtccagtaaatatatgtagatgcacatgtttcaataaatacaatcagatggaaagttgtcaacttttgctagctctagcattttaaaaactgtacatcaacagttcaaatctttaaaaaaaatagatgaagggtataaaacaacttaaagtccaatgcgtcccttcacaccaggcttgatcgagaaatgagaaacccattttacaggtgaactaaaatgagataggtatttcatttacccttttacaaaggccaaatgggaatgctttccaaagttgtttttatattggaggtaaagagggggaacaggaattgggtgaaacatagtactcaatcagaatctcctgcaagtcttctagaagcattcactggaactcagtgacaataaaatccctccccatggtgttccagattaccaacacagatatccattcagaagaggatgagatctcagaatggggccagaagaggactttgctctaccctaaagacaccgagatctccacagtacttaacgtgtccttcaagtgctccctgatcaagatagttgttttttaaaatgaaaagaaacatgacttgatgacaacttgaacagtgaattaaaatttcattttgaaagtatactgtcactgtgaaaaaattcctggattataacactacagaatgctatgagagacgtttatcatttattctgtcttacagtctatctcaaattgttataaaatgttttaaatgcagaaaactaagtgaaaaatctctaaacctaaattatcatttgactcataaagcattgcttttatcacaggggacatgcaagaaggtggctggccactcctctcatacatatccctgtttttcttgacttgaaaatgtctcaagtatatttattaaatatgtgttcattatttaacaatgagaactatgtatcttttctgcgtttttcctaccatgtcacagaactcaaaaagcacatgataccagggagggaaacaggttcgttttagagaaatatgaaaacagttgttctgttacataactggggtaataacagtattatggcaattccctttaaaatagcatttgatacacttcaacagagggagtgtcaggcattctgttttgtacaacttccggctgcatcagcaccagttgtgtcaaacatgttgatataacatggtgtttataaaagtcgagttagctgttcaaatgtactttatttttcttttccagaaattctacaagacagagatgtggattcacagtcaaacacagaaaggatacttagttctcaatgaagccggggggagggggtagtttatgagagcttccttctaaaaggagctgtctgttccctgaagaaatgacaattccttgtcccaagcatcactcaaagttcaaaagaagcatctgcagcccagcacaagaaagtgttttgctaccaacatcctgatgccacttgcaccttaaaagtggttaatacctgctgtggattgactcagataaaccaggaacagcatcccagaatctctgcacactgacctgtgaattgatgaagccaaagaccactggtgaagtccatttctctccctttgctttcctccaagacaaagaagagtaggaaacacactgggagttttttgttgttgttttattttgttttgtcttttctttgaaaaaaaaaaaaaagataagcatccatttccaagtaatttgaagcgagataattctagttagtgaagaatttcaataacggctttcctagaaactcaagactgattcaaacagcaaatactgagatgcggttccatcccaatttatggggttttcttttcctttttgaggaaataaataattttaaagagccacaaaagaagggaggcaaattattagatattttgcttgacatcaaagtgattttacatttataaaggcatactggctttcaaaatttttaatgttccagtcctagctaaaaagtcatgtcatgtcccccaaaacgagcctgaattgatgcgaggttttatgcagactttaggtctggtgaagggaattttgtggagctatgtgtcacggtttggggtgaaattaaaccctacgcttgattccagtgtccattttgagctcgttaggattgcatgtgtttttcctgtttgcacccgctttcttcagccttctatgcacatacagatggttacattctcatactgggtacctgcagaaggtcacatgctttgcatcaatggcaattagttccctttttaaaatggaaaatgtcattaagttcttgaataattcaagagtagaggtcacaatacagtgtcccttttgggggtctttatggtgcaaatggcaaaacaaggcgatcctatcagtaagagtagatctaaggtttacaatgtagctctatttagtgtgacaggaaaattaaattacaggaggcactcactcattgtcacccgttaacaggcttgggaaaattgtgaatccctgggggcaaatcactgacgacgtgcgaggggaataaaaatatttcattttaattggctgttgtttcctttgcttgattttgaaaacaacaaacataaacatgtcccccacagttctccttggaaatagggtcccgagtctcccaaacacgaccccaacttacagtctctgcccagaggccggcgggttaaccgccctgggaagcctaggtctgttttctcagcgatggttgagctggtctttatccagggattcctgggaaggaaaatatagggacaggtttcaaataaaaatgggcttccactactccgccccccgcccccatcggagtcagctggaatgcagttattatgtttctggaacaagggcagcccttcgattctatcaggactgaggaggaggaagggaaacagagtgacgcggaggccacccattctttctcctccccagaggaaaaggagttcgagctccttttgagataccgggtcggagaaggtgcagctcgggctggagcagggtggacgagtgttcgaagaggagaaagtgcaggctgggggagcgaaacgaaaatcctgaggtcactaaatgagataaaagtgtctccagggccgtgccagcacatcctagccaccactggtgtcaccagcatcccgccccccattctagccccctctgttgtcccccattaagactggtgggcgtggctgcctgggtcccgctcccaccgcagcggggtcgcgctcccagtcttgacccaaggccgtctgcctgttcgcccggccctcctctgcgcggtgcccagcgggctcatccggacggggccgaccttggcacctgcaggagaaaccctggactcgccagtgttaccggagacgggagagcgatggggagggcgggagaggaatacagctgacagagcccatggcgactggggtgggataggtcgggtccggtgtgaactggctgcctagggtcggttccctgcgctttctagaatttgtgggggaaaagcaagaatgaccgtccctctgcctcgtgctcttttcgatctctcccccgacccccagtgacatttagcaggcattttcctttcgtggccttctccactaagacccttggaagtcctatgtcagcgaagtgagcgttgggaggggacgagaagaaccccccggagggccaacccgggttccgcgtttggcgcatctcggcagccggagctcgccaaaccgggacagccccacggacccgcggggactgggggctcggccggctgctctgacgacctcggcgcgcccgatcggccccggctgcctggccccgggtacccgggcacacgccgccttcccggagcccgagcacccgctccggctctcgcagcctgagcccaaggaaggctgctctgcaggtccccgggccactcgcggggagcccgagccagcccgccagccagcggctagggcctcacccaggaatgaggaaagggagtgctgctttatttcggaagcaggtccgactctgtgaacacctagatagagggaggcatttaatttttatatgcacatatatatatattgcaacgtgatttgtcctaggtagagttatttgtgcctcaactttgatacatttcatggtagaattaaaggacaaggttcgtgcctggggtgggggcggaagagaatagtgaaggggcagtttagatgttttttcttttctaaatgattcaatttaagcaaacacttgggggctccaggccgctgtaattccaaagacaattttctcttgttttaatttgatttgcattttttcaacgttgataatactcaatttcatggctgaatacacatgtaaacacggttaggtcgtgtttttcgccacttgcaccaaacagaatgtcgcttgtctcggtgccatgggaggttacacgccgcgtcctcaaaatatctgcaagtttctcctaaattatttttcaaaacttggcctggaaatttgtctgagcttcagaggtgacgaactaaaatatatctaaactgaatatatctactgaactagccaaggtgtgggaagacctgcacagacattgcaaaaaggaaggcagtaaaggaaacaaattcctatttgatatagaatcaatcctatttttacccggcattatttttctatattgtattaatagttttaaacaatccaaaaataacaaagaaattatcttctcccagaaatgtttttaatgtggatttcattgctagaaagacaagcattgagaaatatatagctatacctttataaggagaggtttaattaccactattgagctattttatcaaacataaaaattagaagaaaatgcaaggtgaaattgagaaataagcgttagtcatatcaaaactgatattcaacaaaatagcactgccaatgacaatgaaagtaggatggtgtgacctgcctgtgagcagctaccacaaaactgtaatgcaagcatatcacacattgttttgccctcaggacacaaactagacagacattgtgcaaagaaatgtttggcacctaataaatttattaaaactccaaatacattttatactccatttacgaaactgtgctggaaaaagtgaggacacacttttttggtttgtccaagaataccttatgtaataaaatggctgtctaatttccagagctacccttcatttagaaatatatatttatctgcttgctattgactaatgtggaatattcaatactgtgagcaatatttctatctcaaatcttaagaatttacaaactacaatgtttgttttattttaaaaatccttaaaaatgaaaagaatccgtgaaaattctaaatcctaaaaaataaaatagatctgtgagacttcttaaaatgctttatgctccaggctggctgataataggtaactgtattttaaattgaggtgatctaatttgaaaaatatcttttatcacgtgaaaggcatttaggcaaacaagaaaaaattccatttgaaagacaacagactttgaaagagaaagtcgcttaatttttttaaaaaacacactcgtggcaggccgactgtccaatgtctgcaagaaaactgttcttcaccatttggcttttaaaaaaagaattattaaattttaaattataattgttaggatttgtactaaggttttctattgttttggaagactggccattatgcctactttattttacacaaatagatggcagagtacgcgcgctcctcacaattgcttcacagcaaacccattcttagagatggagctaatgaagggggctaattgtaacacacagtctattcagagaatgcaaatgttggacaatagagtacatctttccctttttctattagtaattgaggagtaaatggagatcttgttaaggatcttagaagtttgatcgtcactgagtgagtttgccattttaatttgctttcatccccaaaacagatctgtattgagacatggctacctcagccagaagcagagctgctgcacctcagacagaatctgtcctccaccctcaacttcattgaactgggtctgagctgcagcaggaaacagggagaagggctggggtgggggaagggaggcaagggaggaatggtcgggaaagtctctggaaagcattctagacaggtggggacttccagatgtggtatggttgggggcttgggaacttgggagggtgtgcaccttgggagagtcatgagtcctaggaagaagtcacagaacccaccccaacccctgcaaaacgtccagcagctgggagtggggaggcgcttagctaagggtgtcatacagggatagtgatctgcctgttctttcatgatgaccaagagcccagaggcctgagcctgaggtagggaaggggtgtgtgtgtgtgtgtgtgtgtgtgtgtgtgtgtgtgtcatgtggtgtgtgagagagaggaggcagggaaggaggagagagattgtggaatgcaagggagaaatcatgcagttacttttagttgtttactgagcaagggcaaaatctaaaccgcgcttgccacaatcaatgaaaggatcgcctcagcttccagagttgagctccctaaatgagtctggcattctgataactgcaggtgagcacctgagatcaactccttcccactgctcgatgctgggaagagatagggatgcatttgttcctgagctctgggaagggagaggcaagagggggatttaattgtctgcctgggtgaatcgaaatgtcctttaaagcacagaaatcaagagagattggcctttaattggtaaactttgctgattgggggaggtggtaattaaaatggaaagaggacaaaatacagattggctactgcttcccccactgtctcgcccccataaacagcccccaaaattggtattctcctcccctctggccatctttacaaggctcagcacacaatctgattgtgggtaattgtgtcattcttgtgtcccaaccttagtctaacactcagttgtccagtttggagtgagaatacaattttatctagaactctgttcacttccaagagttggccatacacatgccaacacgtgaggagctggccttagaatccaattgtctgcctgtctctgaaatgccgaaatggaagatgctaagtctgcagggaatctcacaccactaaaaatggacaggccagggaacttagcttcccggatattgaaaagtaaaggagacctccaagccaagcctgagccctgatttgaggaggtctagtgctcatttccactctgtgtccccggagcctggcacaagcttggcaactgttcacatgcacactcagatgcactctgctggagtggtgctcttgtatgcgatgggcctactgggtcctgggcagcatcctccctccctgagggctgcaggttgatgtgcctaggccagcatcctattcaggggcaaaccccagaggcaggtgtttatggagatctgcattggcatatatgtgaggggtgggagggggaggcttgccgcgggggctggggccagggcgtgctggggaccagctgtgggcggtgtatgcattccagctatgctgtcacctgggttgtcaggccaccaggtgcaggtcagggggaggtcagaggcaagagcctcttaggacattcctagcccttgctcccagaatccctcggtagggaataaggcagacaggctgtagctcagaaatgatttggctatgtgggttgttttaaacttatatgtcagcccttagtctctgcccctgacattttctctcttgtctggcattttctccttctaatcacaatgtaagagcctgcttgctgcctcctactttccagcactggctagctggccctggaagcatcagtggggagaaaagcgtggtccaggactgaatgaacttctgcccaacttcgagggaccatggccacataagaattctgactgttaccccagaagacagcatgagaatccagcctgatcccagacatcacccatcctcgtctcttctaggacagtccacggggtttgtgccatccttccagggggtaccaaagcctggctcttctgagatcttccagtttctttccagcctccccctaacacttcagatgtccctactcattttccagattctggagttctggtgaaggccggcctcctaattcattgaaataggaattgtctgtgccccagagtcctgggaagccagaataagttgagggaatatgagttgaaagactccagctcaaagctgcgctgtgaaattggagcaagttacctaacttctctcagccccaagaccattacctgtaaattatgatttccaccagcaggaagtggggaagcttaaaagagatcctgttcaggaagataccttgcatggttcctggcacctaggagaaccccactcaattgtgattggattgactagagtttccattcaaaataagagagggcaggacgtggatgggagcatgaaggccactgaaaacactaaaatggtaaaacaaagtttctgcctataaattgactaacttttctgaaggaaaagtctctcttttctagagaggattttctcaactagcaggggatagatttgttgaagttacaacttctttctgtgtgtgaactgccccaattaatgtagctcagaatcacagaacaaatgaaaaatatatagtgaaattgatctcctttatttgaaacttaaaatgggtttgtggaggtaaagcaggcaaaaagcttgatcagagctttatattttatactgaagggtgcacatgttgatatcttgacttttttgctaaagatgcttctgatttccatatgaagctctctataacccagctcctgccctggaacctcaccctattccttcactgaaaacgtcatctaatcatcatctgtccttttcgattatccagctatctacctcaggccttagtgccttccaagccctctcctccaaatacttccaaagattgttttatgttttcaaataaagcacttttaacattcatgaattcaagttaggaattatatatatgctttcctttcagtaagcaacaatttcccaacaaaattcaatatataattacttctgctttataaaaatagaaggaataataaattgagattatatttttcattaaataccaagtcaaaattcacatgcatgcaatcctatttttatttgctcagatcattaccaaccctagttcaaaaacatccctgcttatttttggacctgtgtcttattattttcaaatcattgaaacaatgggaaagctgatttactgattaaaaaataaactaggacccaaccatttaaagaagcagagattgaaccacataagcaagtagaactaaaaaacagtaaacaattctcgtcacaaagttataatgctgcattacacgccagtatttttcccttacacatatgtttgtgaggctgaaatattctctctcaataaatttaatgatgtttaagtcaagaaagtatagtattgccagcatcatctcctgacactgctgggaatattgctgcctctgattaacaagagagggttaaaccccaggcacttgccctggtgggaagtgagacctctagctttgcatgaatgaatgtaacttaatttgttgcttcttttagcactcccagctatcagttgtgttatctaacagtgaaatatcaccccttctttagagagagattgaggacaagtaagtcaatgctttttaatgtgaacctgcggggggcggggggagtggtgacaatgacatctgaccagtccatgtgaatgttggcagtgagctcagagctctgacaaacagcaactaacgtaaaaaataagcacactggtgtgaaggtatgcttgtaaaaactccctgtcctctctaccttttcatgagtggtactttagcacaaggtggcagcttcttctgcagaggatacaaatgatctggactaggccccaagggtgcagggactgagggggaggggagaataggcatcacctccagtctagcaagagggactgccacggaattacagcttgtaaaataagcctccatcagtctcccaggagacagccggcctcaacttgggtgttccctgcttgttagcctcagtcataattggtctctcctcccatcccacgttgttggttttctgtgtgtggcttttggtgtgagcgtgttaggtcatcaacaaatacaatagcgggagggggcaactggggacacacatgattgttttagagaagaaaggagaaaagggataagagagtgggcaggaaggctgtgaacagaatggggaagatggcccaggatttaggcttccgaggcaccccctggagtgctccagggtagggaactccctgggagttttgttaaagggagaagaggcctgctgggagctggggaccctgctgagctccgctgaggacattcatccattcaacgctatttttgtttgcttgtctctgggggtgcctgtaacatcctgcccacatccggtgcctctcatcaaaaaagaatttttcaaaaaatcccaatcagggtgatttgctctagaaaggccacgtgtgtggagctgaagacctaaagaacagcccaggaccctggcgggggtagggtgtgggtcacaggccttcatcctttttccatccattgttaaaatagattctcactatcttgtctctccatcccccatctccttttacctcttctcagaggaaagctggggatagcggctacagtaaatttctgatctaaagttaactataaagcctagagtggagatgtcttcgcatttaaggaaggttgaagatacagtgcattgtttttgctcagaaggggaaagataaagataagatccctagacccttgagtctttatttactgtaaaaagaacatttgactgggaaggaaagagcaagaagtgtaattaagtcaagtcgcaaattttggggattgattatttttttctgtttgtatgtttcaaagttttacattttactcgacaacccctggctggcctggttgccatggtgctgcctccagggctggtgtccatgctgtcccccacccagtaggatttcaggtctgaaatcttgttcttttgctacagcagggacagcaaactggagctaatggcactagggtgtgcgtgggggtggaggtggtctattctgtatggcaggacttgatgcctacgactttgcggacataagccagaacgggctgcttgcaactccaggttcatggtgtttgggaggaaaatgtttcctttcctgcgctctcttgcggggtgaaggtgcatagtcagaaaaggccttgctgctcttttgaaacataactggtgtctgcacattccagatctcatctcggccacccctccctccaagccagggccacctccagacccccggatgtgtagaagcatgcactgccccgaagaaaacgcgttgcccccaggtaacttcaggtacctcctagggctaacgcctccttctatgccatattgagccttatctcttgcttcttcccgcccccctcccacattaaaaggcccccaaagcattgaggagcggcttctctttatgaagctggggagaaggcgggcgataaagattgggcgtttaaattggccatttggaagattacatctcttcagcgagggtctttctttcaaaactcgcactgaattaagggtcatggctactccgtacccggctctcaaaggcacggcacctttgaattaggttgcggagtggcctgggcgaggggacccggggccatcaaaggcccgagggaaggccgtggggcgacacccgtctaatgacaagtaattgaaggattcgacgccgcgcattaccagcggaacgggaggcattaattatttaaaaacgattagccttgccgtgtgtcctgcaggcgtcccatcatgttcagcgaagataaccagccacccgaggcgagccggggctcggagggcggcgggcgcgctccccagcaggcttcgggtgcggtggacacgggcgcacagcccaaggcaccagggaaggagaggaggggccaccaagggtccccacacaggaaggtgactacataacactgaccctgctgaacaacgaaacagatttctgcccacttgggttcgaagtctggtgactgcggcgcagatgggaaaagctttccggtcgggggtggtgggcaatttccatgtgccagttccctgtcgcatcagaccaaagacccaaagtaacccagccaggcacgggcctctcacagtgcctgctacccaggcgtttaaagaaaagaccccagagagaatgtggatctggcgtgggggcagggattgggggggggcgctggtagacacctggggaaatacaactttatgaggtttcaaggggcagcagcagaactactatttttccgaggtccacgcctttccgcaggcggcggaaagacgcggctggttctgttgggtcctacaaactcgcgtcctccggaattcccgagggcaagcccggcacgcgcgagcgtgctcctgcccgtggaaggggggaaatcggcgactgggttgcagggagaatgcgatgataaatggccctgcgtctgctttctgactttctctcctggacccagctcgtaaccccagaggctccccaacctgcctgccgccaagcacggctgtgcgcaaaaggccaccagccgcttcctgcagccagagctaaggttcactcgcctcttagaaaggcgcggcccctcccctgctgctgcttgatgacgatccccatcgtctcctcggcctgcctgtgtccgagaaagagttgagactggactcgaacccctgcgcgccaaggggagggcgtcaccatgctccggcctcagcctcttcaaactcccatgcaccacgcacatcattttctgctgacccccacactagattctggggccaagggggttccccacaccccaccctccactgttctctggaaacatgctgctctcagatcgaatccccagacccgagccgctcgaggggcctgtgtggcttcctcggggccctaccaaactcctctaactgagctcagagcctaagcggtctgagtttgcaactctacgacccctcatccttccaagtcatgcactttccgaaccccctgcaaaaaaacccaacgccttgagtctcagttggctgagcttaccaccagccaagcccgcccgggcgtccgagccctggaagggagaaggactggctgggggaggggcggtgagcggacaggagtggggtgcggacgctgaggaggggagccgggcgcggtccccgggtgggcgcgctccctacctgcggcggccggcgggccggctggcgggcgggctgcggagcgtccagctcgcggagggaggaggccgactgctccgagccgaggcatccccgcatttatttgagctcaaaccaagcgactgttgactttagcacacaaagcaaagatttcactgcccgctagtttaaaaatgaatattttaccaagatatcgatcagcgttataaaattcagttaagtacaatgggatcctggcaaaaaaaaaaaaaaaagaataataaaggaggggggaggcaatataatatctgtgcaaatttgctgaagtgtgacgtggcatggaaagtttaccctcctggaattcggatctagaatgtttttttcggttgtttacagactttgtttattcacagatcatggttgcttaaaccggcgcgcggaaagcgtggggaaaaaaggaaaaaaaggaggggggagagtctctgcaccccacaatgagtagagttggggaaagcgcgcagtggcgatttgtgagctcgttatctcggaacccgggctaggggagggatttaagcgggaggggggcgtgaaagacacaagaagcacagaaaagcctccgaaagcgcctgctccccgacatcctttttatgtattcggacagaactatatcttatcggccgggatcagtgaaggggggcgcgctaagtagtttaaaacgaccctcgcacaatgggcgtgccatacgaaacatagcaggttagggcagcgctttcagcctccattgtcccccactcggcccccggccctgcctctcggctccttcgccacgggagccttttatgtgataatgaaacacatttcaggccgggctcacgacgtgtgtgtccttgctaggaggagagacggcctgattgctggctgtggcctccggatccccccctccccaatttctcttccttgtgttcttcgggacaatgtggcatgttaagaaagggatttggtggcgggaggggggcagtggcgggtgggaggcggaggcgatgccaaacccccctcaagcgcgtgggaaggccaggcttgttggggaaggcggcggggtgggggatggggtggcagagaccccagcaaggtagcactcaaagacagtctccaggtctggggcgtagctggaacactccaggttaggatggtcaagaagcccaaagatctaatcttgaaaaaaggagcctgagcttagaaacctgaggcaaaaagtcctagcctccaggctttcggagtgtttttacccaccgcaagccactgcgcgcgggagtggctcccaagtctgcctgacccgcgacgacactgatcctgccctcgcccagccagcagatgtcctgggcaaaaccaacaccagactcccctttgcgctgtcggccttggttttcactgccgttggccgtccttttaggccagcgaggtcgtctggggggagaggcagcatggtgtataagaattcactctgggatttttcgttatacttttagagtccttgaaggctcacaaaatacctgcataacccctggaccctgcaaacctggattgccaacctcacctaacttacaagaagatttgcaagagccttgagttttggagggagatggggagcaaatttgccgacagtggcatcttcactactgtcatggtccattggccagacaccccttacctcctcctcactcccaaatataccctatttttaaaaaacagacttggattgttaccctgacttaccctttcaaaccaattccaggagaagatcttctaaatgtttccctacaccaagtgtctcgccatttctgggttagtaaggtctttctgggttagaaaggtctgccatggttgtgcacaatacctgctccagggagaagggtgggaaagggtggcaccctgtgtacagaggaggctggaagatccaggcagagtcccaattccaccactgttcacagtggtgaacaggcaaagtgctgcaccacaaatttgcaagtttgatccaggctcattgacctgaagggaggcccaagatcagaagtacagcaaaaacatgtgaaattgaggcttcccccaagagaagcaagctgtggggcccaagagaccacaacaacagggcacattcaaacagccaaggtggaaaattgtgatatgtggagagtgatcttctactggctttaaaaataaacctgctggaatggtcttcctgggatctgtgtatttcattgtgtgtaaagttaacccccaaattcaaaaagtaaccataaaccatacaagttccatttaataatgtgcttgctttagtgtttagggggatgtgtactggtatctgcaaatttgaagtggatttagagaaataagatggattgaccagtggaggtgaagatagatggacaagtatgtgataaagcaagtataatgaaatgttaattgcagaatctcgggagcaggtccctgtgtgcctactgtaaaattcattcaattttggtatgtctgaaaattttattaataaaatgttgggaaaacagcaacactccctgggccaaaataaaatacaacctgcaaccagacagggtatccctccctccttcttgaaataatttccaagcctgtatattttgtaagccaagtaaagaaaagaaaaatctggaagaaaagattcaagggataaaaccgggtataacactttaatatagatttgtggaactctggcccttgcagccagaatacacatttataagccataaataaagcacgcagaaaccataaattaatcggacccgagacctggatttcaccgtgtcaagattgggaatgctttttttttctttttcttggtcatttacaacagacccttacattattttttttcctgtttttaaacaatagtacaaccctctggttctgttaaaactacatggttttacaccgagtcactcacaaaatttttttttttttttaagtaagacttccctgcaacaacagcaatggaggagaacaacaacaacaaaaaaatcagaatctgcaggtgcttgaagaagcaggagtctacacagtagtggaaaccggaggcttttttttaactttatattctttcccgttttcctccttatatagaacgtggggtatctgtgtggccctctgtttgggacggaacggctgcagcgggtgaagaagactgctgtcttgggggtgttggggtgggggtgttatggatttcttctcccttgcgtctctgcaacaccgtctccccaaagtctcgacccccacttgctctctcacttgtcctcgatccggggtgccagagttagccgggcctgaagccgtcgtcttcttaagaggagttcataatgggccgggagtacaccccctggtagtaggaggtatctgcggccaggggcgaggcgtccaggcccgttttgttcgtgaccgggcccatggccaagctgccaggcatgggggaaccgtagccggggtagtgcatcacctgttcgtaggccttgaggtccattttgtggggttggtggtggtggtggctgtggtggtgctgctgctccgaggacatgaggttgttgatggagaacgggtggttgaaggcgtagtggtgttccggcttcaggtgggcctcaggcggcaggcccgggtggtggggcgggcccagcaggtgggccgcggcctgctgctgctgcccgggagagggcgccggctctggggggctcagcgccgcagccggcgtccccttcagctctcccaggccccctcgcttgtgctcctggcacggggaggcgctcgagtgaggcgactcggtgcccgccggagtctcggaggccggcccggcggcctccccgagttgagcctgtgaggcctgggctccggcggccgccttcttgccgctgccggcggcgcctgcggcctccttcagcgccagctgcttctcgcacttgaagcgcttctggcggcgcaggtagcagccgttctcgaacatgttgcccgagtcagggtgcagggtccagaaggagcccttgccgggcttgtcgggcgagcggggcaccttcaggaaacagtcgttgaaggagagcgagtggcggatggagttctgccagcgctgctggttctgccggtagaaggggaagaggtccatgatccactggtagatctcgctcagcgtcagcatcttgttggggctctgctggatggccatggtgatgagcgagatgtacgagtagggcggctttgcgtgcgtgtagctgcgcctgtaggtcttggggtcgcgggcgcggctcaggcccgcctgcccgtacatggggctcatggagttcatgttggcgtagggggccaggccgcccatggccccggccgcctgccccccgagcgggctcaggctgggactcaagtgcggccccatgcccgccacgccggccgccccggccgagccgcccatgcccgccatggcgcccgcgccgggggacatccccgccagggacgggctcatgccagcgcccacgtacgacgacatgttcatggagcccgcgctcatgttgcccgagccgctgcccatggcggccgccgacatgctcatgtacgtgttcatgccgttcatccccaggccggcgttcatgttgctcacggaggagtagccctgcggacagagccccgggagggaggcgacagcgttagcaccgcggctggagggtgcccagacctcccacccaccgcccaggcctccgcgtccggggaggcctccggggagccctttcgtccccgatggcccagtctccggactccgagtctgtttcattcagggagagtcatgatcgatcgcccttgggaaggtggcgagcggattgctgcttgggcatgtggcccgttcctagcccttctccacctcgcccagattctagaacaggggtcccatggagtactcccaagccagcaccccaaatacattcccctaccccagagtctccccaaactctcccaccagcatactgagctggcgccgaggcccgaagtccccggacgccacctccggtcgcagcaagcaacctgcgggacaacgcgcggggcgcctcgggctgcctccagcgaagactgtcccgggccccctctgtccggtctccctccagggaccccctcccttgtcccagggaaactgcaaggcagtgcctgtgcggagtgcgggggcggctggaggcactgaacggggcaatagggaaagaaccgagacctgaaccacacgcggctgagctttgcaggcaaaaactttctttctctttgtccactagtctttgactctgcctccacttcagcccccaactcctacccatcttctcctcctcagctccccaccccctcgccggccgacctcccacccctccccagccgcgcgctgccaaacataactctgttaggatagtgcgtggctcggccacgaagaggatttggaggcgccgcaagtcaatatttgatcacaaagttaatattatctcaaggctaacagtgtgtcgtataaaaaagagacccatttgattccaaggagggcggaaaaggcggctgcccagaaaggctggggttgtggggcggggtgggggggtgccagcgagggaagcggtcctgaggttggggaaggagcgagcgccgccgctccacttccccctggaaaagacgagcgcttacctcgggctctgcatagtagctgctccagtcggacggctcgtgcccttccatcttcaccgctcccagcatactggaagccgagtgcatggcagtttaaaatttaacagccacaacaaacgaccagcaatcaccccccacccccaccctcttttaaaaaaaagtcagccaaagcaccgtcccctcctccctccctctctcgcgctccctctccctgggctccactccctctctctccctgggcaggccggaggcggtagttggaagtgggcgggaggtgggggggggcgaggagcggaggaggcccaggccagcgccccgcggtagggagcacccgccgccgccgcgctcacgggctgccgggtggcggctgaggttggcagtgccgagctgccccgaggcggcgggaagcgcgcggcgcgggggctagtgggggggtggggaggaggaggaggaaggaggaggaggaggcggtggtggtggtggaggaggaggaggaggaggaggaggaggaggaggaggaggaggtgtggaccgcggagcggacaagtgccgcagtgacgtgggaggctggtgatatagcgcggcgcgctggcgcgggcctccaatccccagacccggggcagcccatttgaataatcagctcacacctaggtgagaggtagccgcagccggcgctccgcacctgcccctcagcgcctgccgtccgccccaccgccgcggcgccccgcactcctgggcgggccaggggagcgggctgggcgggcgatcgggcacgcgggatccctggtcgagccccctttcctcccgggtccacagcgagtcccctgaggaaggagggacctgggaggaaaccaccctctggggcggctccggcctccagcccccgccccgtctcatcgcgccgggcgcccggtgcgcctgtcggagggcgcgtccagcctcagtgcccggcagatccctatgaaagccggatttatttatgccgggtttcttcgctctcagtgctcattctctgtcaaaacagcaagtccatgacagccaatttgcaaagcgctgtcctatttagaaaaactacgtacacacctttaactcgcccgctgctgctcctgcgaggcccctccctgttacagttcagacccggaacggcctcgggagaagcgcggggcgcacggtctggccgcctcggctctccgactcctcagacaccggccgccagggacccgcagtggggcggccggcgcctggcgcaagcagcccctctagcagcggccgacggttgggaggctgagatttgtctctgatattcaggccggcgtgtttcaaggttacttttcagtcacaaccgaggtgcccacagcatttcgtaactaaaacaaacagggcaggaggtggggagggaggggtgaggagagaagaatccaggaatcaatgatggggcatatggagttgacttcaagagcgtctctgtcctctctgtcttccagagggactgcttaatagaaattagaaactccagcaatcgtatacttttatttccccagcagctcttgggttcaaaaattgtcttctgttctgggttagcctgtgagcccagatttggagtggggggatattgcaggtgtttggatgtggaggctctttcttggttctgaaaacctggctggaccttggggatccagccctgtacccaccccctcagacacagagaatgcataggaactagtgggcatccagcccacctgtccaaaattgggggcgatggtggcagaagacaggcgagatggcagacacggagcttcgcattgaagcttgagtaagggtgaggctggaaggcaagcgaggaggtagcagtaggcacaggggaaccacttccctaaccccaggactctcaggtctgcacggtttgggacacagaaggaagccgccggcagcatcttttgctgctgaaatgcagatggtttggacacttcataaagagggcattaataagcccgccgagtgagcgccagggcgggattctcccacaaattcaaggtctgtatctccgcggaagccgtgcctatcggtcccccgagtgctgaaggctcccacgaggggcaggccagcccggtgcgccagggaaggagcttgatggtgtgtacggctacgtagtgaacgtggaggtgtgcgcagcggagtcagaggggctagatccccagcatttcccacggggtcccacctagcgcgtggatgggagcaacttcatcactccaccgagggcagggaaagaggagtaagcattggagctcaaagaatgagcaatttttcaaagctttctccgcaggcctgggcagacacacacgcacacacacacacaccgcacccccaaaactcaaaagaatgttatggttgacctagtctgtgcgtgtgctgtatgagagtatttgtgagcttatgtgggtgcccacttccctttctattttgctcctgggtggaaatttggtcccagaaattattccaggaacagaaggagcgagctggagggccgcaggagaagggggcgctacacttccaaggagcggactttggaagcccccacctccaccacagcactattggtggccggggtcagggacaccagagagcgctcggcgggggcttccacagtgacagggcgccccctgtcggccgccaggcccgcgggaccgacccgagtcctcatttacccccgcgatcccaaccccgcagctccggcaccggagcaccttctcccccgctctcccagtctctccgaaaacgccttcggggggactcggcctttttggagccccaacccctaggttctgcgcgaacccaaaacggcctcctgcaccctggcgaggttctgggagctccggtagggtagggctggatgacgcctcctagagtctcggagcagccgctcccgcaccctcccggcacgcctgcccatgggaatgcgagcggggtctacggttagctttaggtagctgggagcgggacaccaacgggctgcgaaggaagcagggacgttcagacagcctggggttcgcgttcccttccagctcagcggtctttggagctcctccttcccggagttctgatttctaaagggctatccagagttctggctcaggcttgaatgctgaagattgctcccggagtttctctccaggaaaaagttcgcggggacctcgggctgcagatgtttctcccaatccctctttagtctaccctcatgtagggccgagacctacagagcccttccctttccattttgttaggtcaccgccggcttctataataaagctgctttataactgaggactgtgcttggggttagcatgctatttttattttggatgttgcctcaatggcaaagtcataagactcgagttcaaatccaggcctcctctgctctccctgggaagaaaacacccaggccatccaggtctcctaggccttcatcttgctggaacaatctgcgttcccctagcaaaagtcctccctagagctctctttgtcacatgaaaccaaccagtgcagaaggggcatcattgaacagaactcaattttcctaagtgagaacccatgaaatacctaaggagaaaaacaataaaagtcccattaatactccaattcctaaaacctttcagagaataaatacccaggcaaggccttgctcaaagttccccagcgtgtttagggcaacataaggcagatatgtaggcaagatgaaggcagaggggatggaaaagtgacagcacagtcttgggaaagtatgcatttttactttcttataaactttttaattggtaaaaaagcagatgtccaaacaccccttattcattctctggatgaatctcaagtctcaatgaagaaaaggcatatcgtgtgtcaaagattataatcaacatttcactttctttgggtgggttattatttctgaaatgtactgaaaaatcagccaggcgcaatggctcatgcctgtaatcccagcactttgggaggccggggcgggcggatcaccttaggtcaggagttcaagaccagcctgacaaacatggtgaaaacccatctttattaaaaatacgaaattaacaggatgtggtggcccatgcctataatcccagctacttcgggggctgaggcaggagaatcgcttgaacccgggaggcagaggttgcagtaagctgagatcgcaccattgcactccagcctgggcaacaagagcaaaactcaatctcaaaaaaaaaaaaaaaaaaaaaattagaccatcaaaatttgtctacttggcactgagcacaccttcaaacacttatgttggctttcaaagttcttggatggtcaaaagaccagttgtttacggagagggcaattgaaaaggtcattagctaagaacaccttatcagagggtatttatgtaaaagaataaaaaaattcagcatgttgcagccttcagcaaaggctcaggaaaatgctgataaagggggaggcaaggtgcaacattttaagtttaatactgtgtgcacctgcatgcaatttatctctccaccgcaagatccacaggaaaagatgaaacatacatttttaaaatgagaaaataaaatgaattaaataaatacgatgttagtaaccttgattatgtttgggtggtagaattatatcttcaatctatgtttttagaagtatgggtggtatcattttatatcactactttattattacattctcttttactattttatggtgaaatatgtaataaggatattggatctgatgttaaggaaactttggcaaaataacttgtgcaaatattcattcagttctcatccttgaaaggagatcagagaagccaccatacaaactgacgacaggtttgagttctgaaaaacaaggcattattattttgtcttactggtatcaggggatgaactgtgattttccctgagttgagagaggaagagaagaaatattcatgtcaaccacaggtattgacttaccagggtggtttctgcatattgtttaggggaaggagacagactctgtcctctgggtggggtgcctttaagatggatctggcacacagatctcttgctttatgcatgtagaatttgatcgttgtgccgaaggttgggtttcagttatggattgtccatcttttatgggacttctcagtggatggattgagcagttgcggattccactcccatctgtggaggtctgtgaagaaagccagtgctctgcccattctgggccagggtttgacaaatatttctggtatatatttgacaacctgttcaccattcttgtgtttttagcacatttctggtatgtgggactattatagcaggtaattaaaataattggaagagataaaaataaaaaatgacaagttttagtagcaataacaacatgccaacctgagtgagaataaacttctctttgagggatgcttaaattagatgcatctgcatttgtggccctgggagctatttcatacatttggatgttattcttgggagaaatctcagttattcctgccaaacaggcaagcagtaagcttcatgaaggacaagagtcatggggcgtcagtcatagactacctggagaatccaaacccaggcattctttcttaggataccattaggcctatgagctgctgattacttagttggataaacaaatgcactttcaacaagtatgaaacaatgcagcatacgagagacatggagatcagaaagaagccactaagtcctgggtttcctggctgatgcttaggaagcagttgtttgcttctcgtttccatctcaaatggtacacagtctctgaatcaacaaaaagagctatatataacttgctctaatattaagcaatgacaaggatggggagtttatatgttttggattcattcagcaaatatttaatgagcacttactatattccagatggtggacaaataggcaaagccatgggcttctagaaactaagtctgttttcctcttttacttccaccttttctccctttttctgcctcaggtcccagcctctttacttttaagccttcttccaatcatgaccttggaatttccaagtgctaaaatcctattccaaagggaaaattatacatttcaccattctaaaatagtctagctgcgggcagagatggactaaaacccaaggcgaagagcctggtttgacccagaatcaatagaaaaaacaagggctcagctgtcatatagacaagcagccctgcagtagcccaattctctcctgtcgccattggcaattcctgtacaatatcagtttcctatcaaagggataactaggggtttctagcttccaggagaaagaaggatgaaggtggccagaggtacagcttcacgcggtggatgctgcttgggagcctcgtcctgtgtcaaacatagctcctaatgctttgtaatgcacgcatttgcattatttagctctttgttaattttactcccaagagtaattccagaggaaggattgtggagttctctgcaaaaaggagagcttcagggaggggtaccatatgacagcaacagtgacccactaggactgggcaaatgaactaggactgggatggcccctcacacccttatgtgcataggaatcccttggtgatcttgttaaaatgcagattctgattccgcagggaggggcttgagttttgcattcctaacaagcttccaagggatgctgatgctgtcagtctggtccactgaccacaggtggaatagcacagctttaaagatctgtttctctcatggatcctgtagtctgtccctagctgggtggtgatatatgacttgataaaatgagaagtacagcttccttttcagcttctgcaggttccctagtgcatctacgtccttcccctctcagctgctctgagccacaccaactcttctcacagccacagttcatggtccccagtccacagaagtcagaacttgtctgtgcagcccaagcaatgtagtggtcctcccgcaaagcagagctgcccaccccccatgccccctgtggtgcattgttagctcaccccacactccccctcctatgctgtgttttccggagacagggacctccctggttgacagggtaggaaaggggacctgtggcaattatcagctcacaatgtggaaacatcattttaaaagtatatatatatatataaaagccagactgagtagtgtcagctgcaacctcactgcatcagcaaacactcaccaagactcttttaaattttctccttaaggaagaggccccagagaacacagactgatcgtgtccagttgcccacctctggggctgggctggccctgaaggctatgcagggcttcccactcaaaagaaaaaagggataggaccgacctctcccaagcatcccctgaacctcttccttgatcccaatatgcatttaagaaacaaaatagaaagatcaaaaagaagggaaagtgaggaagaaattcctgcttattgagtttcaaatgagattttcatggtcctcctggaaacgacctgagtctcttgtgatggcaactggaaatgggaaatttcctccacaaaatttggactgacattgagttggcattgcctacccatgcatgagaaaataacattattaggaaaaattaaaactgaacccatagatttcacaattaccccctttgttaagaaatacaactgttctccttagtgcaccactcaattttttcccaacatatataacagaaaatgctcagaaattaaaatttgtgtctcaaagatgagaagaatttttcaaattaggccattcccttaatgcttatttaatttgcaatatacattcataattagtgataagataatttttccctttgggggaatttaaatgaagcattcattctggaaaggttcctttccttcacatatgaactgctaaaagagacagaaaatatttctttctgtgggcaaatttaaaaaattcctaccatatttataaaggcacataaataattaatgtagaaacactaaaaaatttagaccaagaattaatcaatgtgtccttttaaggcaatgtggattggggataataaaactggtgaaaaattatactaagctgctttgagattcctggatggaaccagatataacacacaaacttatttttcagttgtccctttcacacctggctactaaatcaccccataggttgcctctgttagtctagaaggttggaatatgtgatgctgcctgggaatgaattatactatgttatatgaaaaattatgatgtaagtgacacataatattctccggaggagtctacatgaataagtctatacctttcaaaagtttaggagtttagatgtgccgtttaagtgtgaaatctggcaaattcattctcctaattcttcaaaataaactgctaagtagatgctaatgttgagaaacatgggtcagagttccttggggtgggagctctgatctgacactcactatccccattctcatagttaagtagaaagtgaaaagagactgttttatctctactcacctgttttctttcattcttttctccctcttaacatattaaatttagaaatacagaattctttcttcatgtacattacccaagagtttcctttacctaccctcctccaaatgactgagctctcaaagactagagagaagtcagggtagaggctaatattttcttcagacttgatgattcatgcaagccttttacataagagagctcactttgtttttgggaaaactggggtgagggacattgatggctcacccaacccttctgatcacaatctaggccctctgacccaaatcttgacctgttttcattttataattttctttttttcccaaaaggcattcctttagttagatggagaagttatcagaaacctgggagaaaagaaaatactcagaggtaaagtttccaggttattggaatagtgtgcatttgtacgtgtgtgtatgcatatatgtgtatgtatttaatgtgtgtgtgtgtgcgcagtttatctacaatatacccaagatcttattgctagtgaaatatagttaaataaacaataacccaactttattacctagtatcgtctagctattataagcagtgatatctctatgaaataatataaaaagtatgatgattttataatgaagagctaaatagttgcaggatatgagtaatttgatttaagttttataaaaataaaccctgattctgtcactgcatggaaaaggattgaagtttacacatcaaaatattaataatgatgagctaaatagttgcaggatatgagtaatttgatttaagttttataaaaataaaccctgattctgtcactgcatggaaaaggattgaagtttacacatcaaactattaataatgatacacctagagcgtgggacttaggaggattgggagaggatttccacattttactttatatcttccttacattggacaataatctcttttgcttttgtcataaaataattctaaacaaacactgataagtgcggtcttggccaccagctagctgacatgctgcacataatatttctggttcttattaatcaaaacagacgcttttctgcatcgtcttttagagaaaatgaccaggccccctcccctgcaggaaaatagttcctatttataagaggaaaaattaaattcggaacacccacaggccaggagaagttaggtaggaaaaagaaaccactaagacttaataaatctgacttaattttaaaaaaaagtggttgtcacggggcagacctaaagaaccagctagtacttaaattgctgtggctcttaattgcttatggtcctcaggaagtgaaaggattgaaatgcaggctctatgtggcttcacttaattaatatttatgacttcagaagaaaattaaataaggcaaatggtgtacttttaaacagcctgtggtcatggttagcaggactcacaacaaattcagaagcaagaaatgcaagcacactttgggcatgcgtggtttcagttttcattttttatgcctggtgatgcctctaataccaacatcttggaacattatggtgattgttttcacttatcatgctttgcatgtttctttgtctttgtgattggttgtctgaaggaagatttctttttctgggggtggagagatagggagatgcacaaagatgttagctctggaagcatctataatttctcagtggatgtttttaagatgtatatctgccatttactgacttttttgcctggtttgatgatttgagtttttccattttgagagcagagagttgatgagatagcatcagttcctgtaatgaggaatctgggctataagtctgtgtgataatcaatgtttattgaatggatggatgggtagatgtgtgagtggatggatgggtggatgggagaatagagcacagattctatgttacttgcatttaaaaacccagtttacctgtgagcactggttttgaagagatagaattagataataacaaatcctagatggaagcttttcaaacttccatttgtgacccattaatgtgtgtgacagcaatttacttcattacaagtactggaaaataaaataatggaatagaagttctcagtgcatctcacatagtaaacagagtcttggaaaacctctgtttctgttataaatgtgtgtgtctgcatcaggatggaaaatgcattccttactgtgggttctcatctagaaagcctaagcgaccgtatacactgggagctgagggtccattagctctccttgcaaggaagcttcagttttctcatctggaaaagggggataatagcagaagccacctcttcagactaggtaaggatgacatgagtggaggctcatggtgatggcttagcccagggtctggcatattgagaacatttaatcaatgtttttttttttttttttctctcctgtatcctctgcagcttctcagcattacagctgagaaagttctcaacattttacacagagagatgcattatactatgttttataatttgtcctctcaactcttacttaaaacaaccttcttaaaaaaataaacacatttgctcaaaatgacaccacacatttgaaaagattatttctcatctctatacatgatatagtagctgtgctgagctctgggccaaagactgctccagaattggaaaacatgttctacccacttgtgactctccctagccaagagccagaccttgtcttcaattccatggctttcccttcgtttgaaggttaaagtcagcatttcacttttactgctgttaataactcccaacttttccatatttccatttttttctaaactctttactacatgctaacactgccttcattttttctctgccctcttcctgaggtcacttggtcctagaagcctcaggttccaaatgtttttgcaacctcccctttaccctccccggtaacatgctgttcaccattccactttctgatttccttttctgttcctttagtagtctctgcacttcccctcctctcccatctgtaaagccatctttcttccaagtgatgttctccaggtgacctgaatctggcagaagcctcctccatccatctttttagaaggaccctcagttgccagagccagtctgacaccttcttccataccagctgcttcagaccagcctgggggcctgctctgggggtggaaccattgtcaagtttcacccatcagctaaaaacatgccacttggattcattgcaggtaaccaagaaagtcatactctttaagctcaccaacatagttacatagttcataaaaaatattgctccattttccaagggactttcttagttgacgagtgggagcagaggtccccataatcagcagctggtttgctcattgctgggaaacacagaagacaggtcggtcactggacagggggtgcagaacccagcgctggagtgcacagaggtaggttttgagaaggagtatgcacttcttaactttccaatagcattactcagtattttcttttccttaaatagtactttagctcacttatcagatttcaacttacttttacacactaaagtatgacttgaggtcttcccaggttcacacgtatagaatgaccttttcttttcagctgcagtgcagtgtgtatattccatagttctttagtcagtctattactattggtgtctcaggtgagttccccagaagcagagcctgaggagaggactcctgtgcatgagaattaccaagtcactgtgcttcccagagagttctgtaagggagtggggaaggcagggaagcccagtgtgggccatttcaggctatgcccagcagagaggagcttcagactggtcctgaaggggactcaggtgtgtgagtgaggctcagcgctgcacccatcattggtttaagggccctcctgggggcaggggtctcacacatcccaggcacgtgaagctgtctatgagagtataccaggtggctctgggcacccaagagcagtctatgatgaagagcttgcaggtgcagaagcttgctgaaagccccacagcagatggccctctcctttttaattgcagccacagttgtgacaggggtgtgacctaatgttggccttagctcttatttaaaggcacgtttgtttgtttcccagagaagctcagccaatattcatttgacaaacaccaaatccctagtatgccccataagctcacatcgcagctcatggggcagcatgaatgtcctccaggagttcacacagctgggagtaaaccagaaataggtatgaacacaacaaaattcattattgcagcagcaagactgtgcaccactgagataatagcaattcactcttccttggctggaagggagggttgcctcttgcctgaggggctgatatttaagccaaacactggaggaaaagaaagtttgccaggccgaaagtgacacagggctcctggagttggggttggggggcaatgccagcacaaagacaggggagcaactgggcagcgggtgttagggcaggagcttcctgggaagggcagcgagaacagctcagagacaagaaagaattgttctgaggagctttcaggctagggggtttggacttttctcttgggaatggggagtcatagagtgttctgagcaggagagaaaagcccaggatgggtttgcaacagctcctctctcagtaaggtggagggaagtgagattgaaaccagaatcactattcagtagacactgaggtgtcactgggcttgttggtctgctgctgggagtacagaccacaagctgccttcagctgtcagccctttcaggggtcaactcaactgcagagagcacttcccttgaggtcatggtcttttctagggtggcccaaatccagtcctgttggatgagagtctacaagggtctggccatctcggccaaactcagataactctgagaactataccagctctggggctcaccatacggttggccaaggctgctttggggaccagattctccctctgctcactcctgccttctgtccgtctccccaacccctgccaattgaccccactgactgtaaacacaccacatgctaaactccaattgagaggctgcctttttggagcccagctgagacaacaactcaggaggctgtagcactaccccaatagagaggatgggtgtgggaacatcccctccagtttccacactcagtggagacagctcagttctggcaggagagatctacctctctggtagatcaggcctctgatggtttctccagaaaactccaaacccacacagacaggaaagtgtcaggtaaaatgaaaacaaaacctgggctcaaaagttctgtgtcttagttttggctctcccagaaatccactctgatgcaaagatttgagtgcaagcaggttatttggccaggaaatgctggtaggggagtgatgaggtgagagaggaaagggaaggcagccaggcaggggcctgccatcaggcaggttactactgtgggcactggtgcttaactctgctgggacctctgggagccagagtagaacatgtgcctcagagttgtccctcgcaagggtaggggagctgaggtatttatgcaccaactcctgtcagtcactgactgacaatggctgctcaggtgtcttaattctccaggtacttccagtcctttgtgggtaggatagagttctgctgctagaaattaccctgaagcacaaaggtgcacatggtggcaggtggaaggtaggcatgtgggatatacttggggcttggatattgtctaagttttagtgtctccatttcctaatggcaagagcttagaggcctcatccatgcagagcttcagctctttagtcatcaaacaaagataatgatacatgtgttttaattgttgtgaggtttaaatgtgaataatatctttaagaatggctgaagggagagaccagtagacatataatattaatcacatttcctgaactcccaaactgcattctcaagtatggcgaggccatgagtccccttcaactcatttaagatagaatcaacttggccaggtgtggtggctcacgcctgtaaccccagcactttgggaggccgaggtgggtggatcacgaggtcaatagatcgagaccatcctggctaacactgagaaaccccgtctctactaaaaatacaaaaaattagccggtcgcgggggcaggcgcctgtagtcccagctacttgggaggctgaggcaggagaattgcatgaacccgggaggtggagcttgcagtgagccgagatcacaccactgcactccagtcatgggtggtgagtcacctgcattcaccaaaagtgatattctaccaacgatctctgggcctattcaatgaggtattggaaagatatctcagcattcagaaatgtttctgccccattttttagggataacatttaggaacagtgaggtcagtgtcacctggagggtcagcagctgaatgcagaatggagaacgcttcttcctccctcaggatgctcactgagcccaagacttcttttttttttgaggaggagtttttctctgtcacctaggcttgagtgcagtggcacaatcttggctcactgcaatctccatctctcaggttcaaatgattctcctgcctcagcctcttgtgtagctgggattataggtgtgccgcaatgcctggttatttatttatttatttatttatttatttatttatttattattttttgagacagagtttccctcttgttgcccaggctggagtacaatagcatgagcttggctcaccacaacctccaactcctgggttcaagggattcttctgcctcagcctcctgagtagctgggattacagacatgtgccaccatgcccggttaatttttttttttgtatttttagtagagacagggtttctccaagttggtcaggctgatctcgaactcccaacctcaggtgatctgcccaccttggcctcccaaagtgatgggattacaggcatgagccatcgcacctggcccctaatttttgtatttttagtagagatggagtttcactcaccacattggccaggatagtctcgaacttttgacctcaggtgatctgcccgctttgtcatcccaaagtgctgggattataggcatgagccatcgtgcccggccaaggctttttaaaatttaatttaattttattattattatcattactagaaggaggcatatggaaatgcccaatttgaacagaaattttctagaactatgcatttccaatgctcagtggtgaaagagtcagctagagcattgagtaatggtgaactgtgttccctattaaatagaaggtaagtgatttccctgctttgagtttcctggtgtggtgattcacttgcagtgaatagggactcctgataagatactaccatcacggaaaatcttcaaggaaaggctagatatctagctcttccctgaacaccagaggcaagaaaagggactatacctggggggctcaaatagactacagaggaaagcacttataatttgaccagaagcacttttgtgcaaaataccaggactgtgataattcccaccatgtgtgagaagagtcctccagttttcagggccattgctgcaaagtactggtggaatttctcctgtccttgtaagaactctcatgcctgagtctcagatttacttttaaccgaaagcctttgatttgatccccatgaggctaatgggaccttaaatccatcacaagactctttggaatttatctggagattccaccttctctgtatttctaatcagtctcaatggctttttctataatagagttttatgttctagtcattaatcattttaatttttaaaatagataacatttgaaatactacttcccctttcctaagcttctttcggacagcactgagtaagtaaagccttaactatgccctctggttgaaaaaaaaaaaaaacccacacataaacctgttatgtttcagactttatgatctgagcataaaaagagctgagcctttgattcatattctattccatcacgagtacagcggtactgaagggatttgcatgtttaaaggagtgttcagaacaacccatataatgaattctcaagggtcttcgcagaggaattgctattcatctccaccattgatgtctgtggcggggtctgtgttctctggggacgttgagtggatgccagtgctcagcagcagccagtcataaggcatctgggtagaggcctccatcttgcttggacttgggagggtagagagggtaggttgaatggcttgcaggctgcaccagctggtggacaggtggtgtgtgcaggtgttgagagataggtaatgaggttggttccttcccttaaacaatttattacggagcaccccctttcctaggagtccaaaacccagagggatccaatttcctgcttttaagctggaaattgcatggatcaccacattttcttgtgagaaaaaatgtgaaggcaactggcctgggaaggaaatctctggccaccagattggtaggaaattctacattacaatgttctaaggtctgtctttattaaaactgcagcatatcccaagtacctggaagggttatggttgagtttacttaaaatttgacaagaaaaggtgaaggcacaccagtcctgcacgttgaaagctctgtttctcaaagggttgtgtgagaaggagctgggactgggctgggaaaaaactcagctttgctttagcttggtcttactcatcaacaccaccttttccttgcaactgtgtcaacacagtgggcaggaccttctctgttagtcactacctttgatgtctggggagctctgcttccctatccccaagggtctcttatcagccccctaccaggcattctttttcctcaggattctgttagtaattgctcctccctgagacttctcatccagcctaacaggtggtctaaaccaatggtattcactggttgaagagagaaattgatggatagtagtgggaaaaaacatgacctttagactcaagaccttgatttgagtctgattctgtcacttatgagctgagtagcattgggcaggtacttaacctccctaggcctcagtttcctcatcttcctcaaacaagatcatgctttctccttcctccaggcatcatggagattagatctgcaatgcacgtgatggtgactcagagtgggcctgctgtagatattaattagtacccagaacactcaatatggtttctctgtatgttggcaattgcagggtgtagagtagctagatggatcttcacttgatttggaagtggtctgacttacatcacatgctgtgtggtgcctgagaagctcccttagggaggatcatgaaacagatgtcatccatggcagctgcaggccttgcctttaaactcccaagcactcacctgtgcagccaggtgcctactccaggaggagaaaagggtgccaagggtgtatttcttttgagggtggttattgtttcctccagtaaaactggatccttaactagttgttatgtcatcaacagcatcattatatgaaggaaaatcctaacattttaagttgatatcttagagggcaatcatattctcccacagaaaattccgagttacagagaagaccaattgttctaactcaaggcaagcacttttttttttttttttttttttttagtggttatttctaaagaaagagaaacaagcttactctaggcattctccttctcaacagcttgggaaagacattggacatagactcaaatgacccagctttgccccagctctgtctcttgggagctgggtgactctgagtcaattggttaattttactgagcctcagaagcttaaccttttaaaatagagtgaacacatccagttgtccagagactgtgaaggtggcatgagatcagtggagggtaggagctttgccaggctttggttgtcccacagcttgggggacatggacatagggaagtgcatgctgaacaggtctcagaattcatctcaaaaaccataaaccttactgggcatggaaagggtttggttcttcccaggggtttggttcttgcagagatacacatttgttgatgatgaataggagagcaaatttttattattgaaaatattgaaccggtgcctttgtcacctcatcagtcatattctctttcaacccatccactgtgaaagtgaaagggaatccgtgagggacaggttgaggagtttttcctagatccgtgcattagtgcccaggagccacccgaaggtcttattacacattctgaatcagaaggtctggagtgaggaggggagagctgagagtcagcattttttacaagcccccaggtgatgctaatctcctattccaagggccactctttgagagtctaaggctaagaacaaaatgcctttgacctactttgaggtttagttttctccttcttgagcccacagcagagaaataatcctaaaaccaggttttggggaaagagaaaaaaaaatttaaactcccaaatcctcccttacatctccagaatgaggattgacagactcagaccctagaggttttccatgagccatgacaaggggaggttacaggaggccatgtgaaagcactgcaggcaacaagaagcagataggaatatcttcctgatttttgagagaagggccagaggaagaaggagaggagtagttggggcccaggctagctttccttagggccgatctcaggaagagggagggtggggaaacacctaggaggtattttgtgagactcaagagacacttgaacacatgctcctgtttccctccccagcacgaccccccaacacggcagctctacaacggcaaggacgggcatgggtttgggatgcggggttttgacactgtgtgttgtcttcttcacctcctccatggtgaggaagagagccgggcattgctatgggcgttgtgggggtgagtgcagtccctgagggatgaggccatcgtgcctgctgtgggttggatcctcagtccccctaaggtgaaagggagccatgtgtgtggactctccccccaacagtcctgatccaggcccatgctcaacagactcttcagcaaaaggaactcacatagttgtccccaaagaaccaggcagaaccggcactctgcagcggcaccagaggatattgtctcgaccaggggaggggagatgctctttacctgggagccacaaatacaggagctctgcatagggaccaggcctcccctaacacctgaagggacattaagcatttcctggaggcaccttgaagaggcacaggaaggataaacagctatagtggaaggtggctttagaatagatagcctaagaggctgactgatgtggcttacacggaggaggctgtttctctccacaagccagcttgcgcagcttcccccagtcattacagggaaaaaagtgggaggaacttcaaagctgagtccaattataggaaataaagaagtcatttttttcttggcacacgggaacagtggtgtggaatgtcagtcctgctatagtaccatttaatcaatacacaaaactaaatcttaccacactaaaataaaactgtttaattcatatgctttatactatgcattttacctaataaccatgacagtaaatgagatattttatcatcttttaagattgaacattgtgttacacatatttccatatattgtctagatttcttattctttattttgttatattcaaccttgttaacatttagtgtgaaaaatggcaaacgtgtttatgtgtgaatgtgtatatacattttgtatgtaatatatatgctgttatgtgcttagttgtgtccacctaaaatttatatgttaaagtcctaacccccagtacccaagaaggtgactgtatttggagatagataggatcttcaaagaggtaactaagtttaaatgaggtcatttaatggatggggcctatttaatattaggatgcagacacacacagagagaagaacgtgtaagatgtccatctgcaagacaaggagagaggcttcaggagaaagcaaccctgctcacactttgatcacagacttgtggcctccagaatggtaagaaaatacatttctgttgtttaagcctcccaggctatggtactttgttatggcagccctagcaattgaatacagagagtaatatacctattagacatacatgtcaatgttccctttacaggaaatgatgaactcagcagtaatttaataagagatgacttagaattgtaaattcttgcccactcatatgatgaatatttattggggaccctctgtggatgagctgtggcacacatgatctgctccctcacatgtacacctataaattcacccaacacatggtgatttgggttgctagatgagagtcaagcaaattgcttttgagagaggaggctcagtgaagtggcatttaagctgggtttggatgggagagacagaagaacatcccatttgggaggaatgcatgagaaataatatggagcaaagatgtagacatgttctggaaatagtgactggatagtagggtgggaatatggacagatcataaggggagggtgagagatggccagggaggtcagggactggccatattgtgctggaccttgaaagccaggcccaaaatcctgtttcttttttaacagggaatgacgagtaacagaatttttcaaagctgggaagtcacatgattaaagtggtagattaacctgctagaaacatctagaatgtagagcgagggtgcactagaaataggaaaacagatggactttgcagtaatccagatgcaaggcaactgagaagagggcaggaacgggaggcatccaggagccggagaaaagaggatgctcgggacctggcagcttccttttcatctctaggtaaattaaatactttcccacagtttggtgcccttcatggtgctgctacctgccaggcttgagagagtgagaagctggaggtctctgccttttctgtggctgcccaggacaaacctcattggttctgctgaatgagcatcattagcgtatttatactagaactcagttccagatagcagcatttgagaatcaagataagagagtgttattttcagtgggaaatcagtgggccagtggaagagctagaatagtgagtgacaattgtcttgctggttactctcagcattggcacaggggtgtggtgttgggctaacttaatttgcactcaaatactttgtcctcccactggctgaagttccactgcacagagattatgctttgggtcatgtggctctcgtgaggtgaatgtcctttatgaagaacgagaactaagactctctaggaccggctgggataaggccttggacgtggtgtctatctggttctagccccttgagatggagccatctattccacattagcctgttcaaacagggcctccagcatgctgtcttggatttactctaaaattctaatctcttgatgaagattttggtggctacaaattgctgctcttcctctgggcactggaatggatgggtgtcctggtttggattttctagctcagccctaaagaggaagaagatttctgctaaagaagaatgctttgcctggagtttctggtgctggcaattggcttgggcccactcttgaactaataggttcaactttatcccctggccacaggtataaactcaagagtgaactctttatgccatgtaagccacacaggctgcaggtattagaaaaagagctgcagtactcttctgaaaagtcatctctgctctcccttcctgaaggtggtggaagaaacttgtaatcatgagagctgctgggatccatttgcaaccctgcatgatgctgaccacacagaaagaagacgagaaaaacagaatccagaggccttgacattcttactgggccccagtatcaaaaactcaaaatcttccctacctctggacttccagttatgtgatccctgaaaggcatccacgtgtggcctttcccagtaaggctttagttaggttagctaaaatgttagcaaagtctaatcttattggcagaaaaaaaattgccttttactatgtttgtacctttcaaagacctcatagcccagcagacttcataaatgctggtgaatttctttcaaaccattgtcaaataaaacctcccatctccaattagcataatgtctccattctgaaagtccaggaggcttctttatttttttgttctaaagatatctataccaggattgcaacaattatgaggactactaacaagaaaaactcctgaaacttttgagaatgggatttgcatttgcaaaatgatttgcaaccagacctgccaggtagcacttcacggaaatcaaaaaatgggttttgaatatcgagattatattttttggcatccaaattcgtagtaaaatcacctttctagctgtctgcagtagatgtgactaaactctcagaatagcttccacaagtgctgaatacttttgataaaagtcgatgtagctggaacacagtcacatttgattgacttaccttaattctctaaatcagcttattgcccaaacagctcctcaattcgggtgtccccatgctgcggccaccttctctagttgccagagcccgcttctccaccctaaataactgcgactgcggcagaggcatttgggttggtttaagacggcagtatatccctctgtttcttcattcaggatttctttccttcaaaggagactttgtgtttcccaagtttccttcttctgcttgtatgaatctaaaatgaatctgaactaaaagtacttgttgagtggttatgctcccaactgtaatttggagtcaaggtatgaatattttatactcaaagagtcactgaagatttgtaggaggcttttaaaaataaaatgaatacactcattttgttggctcaggtagactatagctgggggaaaacaaaaatacaggatgagccctcaatcatgagtctttaaaaaatgaatcaggatttgtgttttgggataatcaggagtccctgtggtgagtacacagtgtcctttggaggaaagaaataccagcctgaaggagaaccgggaaacaaaaacaaaagccacccaaatgctccaatctcgttttaaaccaacccaaattccagaggtgcagtttcagaagggagctcttcataccctggcagaaattaggtgtcaagctagagagccagtattcagatgcctgtggcttcctttcactgcaaaaatagatttaaaaaataatccagtctttggcatattttctccgagacggagagacctgagtagcccctttgctttcgctgtatgtttgtgttgcactgagctgagggctttgtgagctcataggctacttcaaaagctgttgaaaacagtcaaaacagaaactgaatacatgtgaattaagcatttccttttttatataaatctgtgagtctttttttttaaaataacatctattggtttatatggagggaccccgttaagcaattttcactggatgcagtttcagcttgaaagaacaaaaagtagaagaaaagtgtctaggctcttttaaccttcaagcatggccacacttaggaggatgatcacctgagaatcataagttctttcctgaagactctgtagaaggacatttggattacaaatcatttttgacgttcatcaagtactcaaatatatgttttaattgtgcctgatgcacattgcttcttttataatgcactaatcttactctaagcaaagtatgtagcaattttgagataaggaagaaagtttctgagctttcatgaggtggctgtcaagatcatgaccacctgtggggtgctgggtacattacccttgagaagatgctctgaaatgacattgtttcttcttttcatttatcgcaaagggtttcattctttatttatttattttttttagttggagtatcactctgttgcccaggctgaagtgcagtggtatgatcatagctcactgcagcctcaaactcctggcctcaattgatcctcccacctcagcctcctgagttgctgggaatacaagctcatgccaccatgccggggtaatttttttttttctggtggcggagggacagggtcttgctatgttgcccaggctggtctcaaactgctggtctttagttacccttcacccttaccatcacaaagtattgagattgcagatgtgggccacagcacctgaccaagggcttcattcttaatgtctaccttctgtcctggattctggatcctttgaatagattccacctgtgagaagcttgaaaacatcagatgtatgcaaattaaaaccctaggtactaattttacctattaaattggcaaaaattctaaaatttgttaacatgcagtattggccaaagtttcactaaaaaatatgcccttgtagcggtatgggaataaaatcagtacagcttttatggacagattggtagcccatgctttgtccccacaattctgcttctagttcttcatcctgcaactgtagaagtgaacaaagatttacatgtcacatttattgtcatagtgaaaacatggaaacatcatgctaatcagcaggagactagttacataaagcatactcatacaaaggaattttagcagccatgaaaaaggatgactaattacaatgcgcaggcactgaggggtctccaagacacagtgtcacgagaaaagcaaagggcagatatagtttattcctctttgtagacaaaggcacacatatgcttagatacatgcagaaaatttcctggaggatagagaataaatgataacaactggtaatctttcaggtgtggaactgacaacctgaggggagaggaggaagaatttgctttttattttataaacttttgtatgactttgtttaaaaaaaatcatatttgtatattatattattataatcagggttgtttatttatttattcatttaaaatggagtcttgttctatcacccaggctagagcgtggtggcacaatctcagctcactgcaaactccccctcccgggtttaagtgtttctcttgcctcagcctcccaagtagctgggattgtgggcgggctccaccatgcctgtctaatttttgtatttttagtagacatggggtttcaccatgttggccgggctggtctggaactcctgacctcaagtaggccacccccctcagcctcccaaagtgctgggattacaggtgtgagccactgcacccagcctaatttttctttgtaataagcaaaaaaatccatctgtggccgtgactctacatttcctgaattaatccacactactggattagtgtggtaaacaagagtttaccacctggccacctcagtctctctgacaatctcttaagcacgagtgagaagtcttaattcttagcattcctgtgctcaggtctttcctgtcatatcaaaaacattacgttatgttctatgaaaccccctgggctccagacctcttccctccccgtaatgctttcctggttctctgaacgctttagcagttgtatcaaccttcgtgaatgccatcgtattcgttttctattgctgtataacaaattgccataagctcagaggcttgaaacacacacatttttttttttttttatatcatggtttctgtggtcaggaatcctggcacagcttagtaggccctctacctcaggacccacaacatgccgagttccaggtgttgtctggggctgggatctcattgtaaggctcagccaggggaggatccacttccaagctcatgaggctgttagcagaattcagttccttgccttctgttgaattgagggcctcagtctctagctgggttctagctgggcaaggccatctcagttcccttccacatgggcctaccaacatggcccccaacatatcccttgctaatttaccaacaccagcaaagcagagagttgaccagcaagaccgatgttccaattgtatataatcttgtgtgattcatctaccagttagaagcaagtcacgagtctcacccacactcaaggggagaggattatgtaagggcataaataccaggaggtgggataattggggggtcaccttagaatcagccatagtcatgaaagttgtatgacattcgggtagcctaaaaggaatgccatcaggaaagtctaataatcgtgaatgattttccctaagggtctcctcatctcgtcacttatttagaacttccctggggtctttccagaccactcttcacccaccctgtgcttattcctctatctccttttcttctgggcttcatgtgataatgccaacctgtgttgaaagattaattcaagcctttcctccttgtgtcctttgcctgtatcctgagggttatgggaagtggcttgggagcaaggagaggtgggattacatggcaaccagtgggctccttctggatctggttcctggcccaagtgttaccttcctgccacccaggctcagcttgcctactgcaaccctgcactgctactcactctgtgttatgtttcttttcttttcttataagagtaatcaccctcttaagttccctggtgaacttctctgggtaggtgggtctggaacccaatggatgttccacagaacgttactgaatgcttttactatgacagggaagaccatctccctctgaagtttattttcttgtttttatctgctttccctctagagggttaagatgaagcggtctttttttttcctggtccactgcaatatttccaggacctgaatggctcctagcacatggtaaacatctaataagtatgtgtgaagtaaataattggattagtcattgagtactcaatgtgtcctgtgaatccagtaggtggaggaagcaccattgctgccatggttctaagggtcatttctcacaactatttcttaggtagctgtatagctatgaacctaaaccccttgcaatcctagtgttactgacttttgtcttgctaatatctaagcattccttatcctccctctcttctcactaaccattgaggattacaatggctagactaagacatactccaggaaatcagcccacagggtgtgatgggaccctggaagtggcttcccatcttctgtctctgcattggtcagtggctagaaatgtctggctgtaactaagaaatagctacaaaatttggagcctgacaactgcccctgtttacttgcatatttgttgccacagagggcataattatagacagagattgagaatggcagtaatgatgtgtcagcctcataaggtgctcagggtgtgtcaggctgtgaacactgtgcttcgtctgtggcagtgtctcccttaatcctcacaccagcccttcctggatgggaggtgggggtggttcccactgaggcatcactaattctaaaaacaactacctggtcaaatgtaaatgcaaattctaagccagcttattaggcgaatgtcagtgaaaataattttaatagcattcttgcattaggaagaagccttaatgaaaacacaattttaacataattagattgaaatagttcagcactgcatacataatctgaaatgatcttacttaagttcacctagcacattgacaagtcaccgttgtaagcttttaagaaatggatttctaatatttgatttttcttagtgtttattcaaaatttaattttaccattaaaatttgcattatatggctcattaaggcaacacctttctcattactgtaacaagaagacacgttcaaacaaaggcacttcagagtgcttgggcctttctgaaggtccacacctcacaggccttctttgagctggccagtgtttcttgctcttagtcacagatatcttctctcacattgataagaatggacattttctgtcaaattttaagtcgttaaaaaatagcctacattttcattgacctccttctttttagagtctatttctgaaaaccaatgctttctttcagtagcgtgtccctgctatctcctcttcactgtttgtgggtagggagtgagggtaggagtggggatgacagtctgctagaagcccttcaaaagaaggggaggacaacactgcccagcgccatcaccacacagattgtcccatagtgctgggagacagggatggcaagttcacagcaggaatattttttccactgtactggtatgtgccaaatgtttatgtagagggggtaattaggtgctgtttttggtgaacgaagcaccccatgggcttggtggggtcttggagacagcacgtgctgtgtgctagaacaacctgcagtgagagatgacacaggcttgcatctggttgtcccacttctggattgtgtcactttgggctactttcttcactttgttaaactccaatttccttatatatgaattgagggtaaagggaagtgataagttcccaaggtctttggaggcttactatttaatgaacacattcttacatagtaccctctttgacaggaggtaagaagtcaagttgtagtatttccagcctcaccctcaggatatcccaccaatttctaaggtagaccagtgtctccctaggactcgtacaaagctgggaatctgacagcaaggaagaggcatggggacattgcccgatgtgtagaaaaccaccatgtctgccacaacatgcaacaccagaagagagaagaagaacccatgtggagagaaacctcatccaaggaactgaagaaaatccccatagtgagccctcctggctgcttcttcctcgcttgtgcttaagacaactcctgtttttcgttccacccacccactgcccaatcttccttttttcccaatgttcatttttactaaatgtcatctccactcatgcaggggcttagaccccaaacccaagttttattcttactttcttactttcccacatagtcagtgtccaatccacgagcaagagttgttgacacaaacctcaaacacctctcatcccctccactgatgccctaatggtccaaaccatctattatctctttgtagttcttgggaccactggagctgctaagtaaacattcttcttcttctatgctttgcccctaacccacggcagacaggaatctttaaaaatgtaaatctgatcatatcacttccatccttaaagctctccaatagtgtcccattgaacaaaatgaaatctctgcagaaataaacctctggagaaatatagattgactacaatcctcagcccctaaattatactgcagaggggaggatgcttaggattcagataaaatgggaaggaagtcagtgacagtgtagtcaccgtaagccagaggtagaaagtccagtcagaaccactcactcataagcatgctgaaaagtggaaaagcaactatgcaaataaacttcagcaaaaaagaagagacatagtgtgctctgtccattaggatgattccagctgcaactatcagaacatcttgcaagaaacgtctgagacaaacagggattttttccctcatataacaagtctggaggtggggagctgattgatctcagtgctctgggtcagcagctgtgcggttctctcagaactggcctcctgatcactaaatgacttcagtagcttagtgcatcgcatccccaccgcacagtcactggaaggggtaggggcaatgcggggctgttctcctctgctcacttcctattctctcactgcagagaatcagtccttcccagaatcttcccagcagagctcagaatttgccttaagtcactttggccaggactgtgtcacaaatcactacagcccactggtctggcacatcttatctgagatcaaggatctcccctcaaggcctgaataaggttggggttctgtaagtaaaaaaggggggaatattgcccaaataagtgggcaaccacaatggctgcaccatgtgcagaaaagggagaggaagaagccagactggaaaaggcataatgcaggaagcagaagaaagttccccaccagcgaaggcttcatttcgtgttatcgaggcgctaatgaaggacatgaactaaggaagaagacggagtcactcaataacttaatgcaatgtgtgattctagactggctcctggacagaaaaaggacgttggtgaggcaagtggtaagattggagtagatccaaaggctggttcacagggctgtgttactcttaattttctggttttgatacttgcactgtgattatataagatattaacttttgaggaagctgggtgcaagacatatgaaagaaaattcttcgtactatttttgtaaccttttcataagtctgaaattatttcaaagtgaaaattaaaaaataaaaaaactcaaaaacaagaaattgaaaaaattgtatgaaataagttttttttaagctaagagcataaattgagaaactacttctatccataacttgtacatatagcaggaattaccaagaatatacctaacagggctaaaagctgtgtaagtgacccagaaaaagcctgagataatgacaattaactataattagacaattaatggaaacatcatagatatagaagacaaataacttatgtttaaacactttgtttgcttatgtcctcatttttcacagccagagtcagatattgtcaaaagttgaaatgtatcctcagtaataatgactacaatcttataaaggttttttttctttccttttctttctttctttgtttccttctctttcttttttcagatggggtcttgctatgttgcccaggctagagtgcagagctattctccaacatgatcatagcacactgcagtctcaaactcctggcctcaaacgatccttctgcctcaacctcctgagcagttgaaactacaggtgcactgcaccacgcgaaactttcataaaggtttttttttttttctttttgagacagaatctcgctctgtcacacaggctagggtacagtggcgtgatctccactcagtgcgacctttgcctcctgggatcaagtgatcatcacctcaggctcccaggtagctgggactacaagccagcaccaacatgcctggctaattttttgtattttttgtagagacaaggcttgccatgttgcccaggcttgtctcaacttcctgagctcgagcaatccatccaccttggcttcccaaagtgctgcgattagaagtgtgaagtcactgcacctagtcttataaaggtttttatactcattttattttaactttaaagaattgtttagaaatgattacttcctgcagcgggaaaatattatctgatttctagcgatttatcatgttttacttcaacatctttttcttttgttaaagtaaaaatactttagttaatttaattgaaacggtataaatacggtgatgctatgttctgaggtcatctgtgtatctctatctagttgtcgttctgtttgtctgcctatttatctatctttctgtctgtctatatgcaaagatggatgttttagatagtatttaccaacctctaacactggttgtttcagtttacataattttgggcgatttctgttgctttctttatactgctttgaattttaaaaattcagaaattttcaagggagcatgtgttttattattttaaaaacgtaaaagaacagatggatttaaaaaacaacacaacttacatagattgagatgggatcaataacattgctgtgtgatgcatgtttcagtgtgaatagaaccagcattcaaaatagtgattgttcctcctgttcctgcctggaatgccttcttattgcttctcttctcatcctgtctcactctcctctttgtttagcctcccttctttcaagacctagtttaggcaaagatcactctctctctcttctgtgacatttcatcctattaactgtctgtgtcgttgaggcagaatctgtctatgactcatccagggcaggggccagcttgtctctatgcaatcttcatacccatcacaatgcttcatgcatgttataagattcaaaaatgataaaccctgggttatcaaaaggcaggggaacatcactgagtgggaaaggtgatgcagagacgagttggaatagaaacaccaataaatataaacacttggagtttacggaatgcttgtggcagaaggtgccttacatgccaagagacaattactccaagtctgcaatacataaccactagctgttattaatatcttaagggaaattttcagcccgaaaattaatatcactgactggttcttagttgttgtatggtttcttttccttcaggttagagttcttaattcttctgttcccttgtttctccagttgtaaacttaagatgatgacgtcttctgtagatatcacttgtcaagtgtgcacaaataacctgtaccaggaagctaaagtctgctcccaggccacttggctgatacctgaccaggatgctgacctcctctatggagttctgtttccttatctctgcactgggcagccctgagttggccttcctctgaagggctgcctcttggcacagctcctagccagtgataaaggacttgacaaacatggtgtgctgaatcatatctgctgtgggagggtgagccagaggtgaggcattgatatggagaaggatggcgacatatttctgatacctactgtgggcgcctatgagcaaaagtctttcctggatgtagttatgcagcaccacacactaacaatattcatcatcatcatcatagctaccactgaattgggggctttctctgtcccaggtaggggaatgcttggcagatttgacacctcaagttggtcgttttttaaccatgcaccttatgacacaattattttcagtaccaatcatgaaataaatcaagtaataatagtggttagaaaagaaacatgaacatggaacacttttaatgaactttgcatatttaatcatgccaacaaataataataacaaagagcaaaaaagcaaacaagaaatagattaattcttttaaatagaattaatgtatattttggaaaaaatacagaagaatggattctgcaagtttcagagaatgatttatgcataaatgacaagattgaagtaatttaaattctggtttttcagctttataatcagtttgtaatcatttctcctggctccaaaccactgttcaaatgcaaaagtcagagactccaattgcacacaaagtagctcaaaaattctgaaccctaatgatcttactctagacatcagtgcacatagctaagtccatgtatgttatgtccatggctgactgtataattgaccgactcatgtaaataaaatctttactaaaggatgggtaataaaaatgtgctaatttgacatttacctaagtattatgctattaaaactcaacagtaatcacagtaattgtttagaatttgttttagatcagcaattctttcccccaggtaggcatattttaccacaaataacgtctggaattttcaatgcaggatgatacttcaagttattgttgcttttaacttttgtagagaccgtgaatcccctgattgctgactccctggtcccagcactgtgctgatgaattcctgatgtccacggagctactacaagatctgagatttatagctctgaaacttcagaagataatcgagatgatacctttggataaagaacctgaatgtatcaactagactgtttgaaaagacacattttaataaataacctgaatatataagccagattgtttcaagggctgtagaagaaacattttaaatcctttctctgaaaaaactattaaaaacacagaaaacgggatactaatagaaacaatccagaaaggcttagcaggacaactcagcaaaacaacacatcaatgaccacttttaacagtctgtggaagtcttttgccagtaagggaagccatggagttgtccttgatgcttttgtttttagtcctgtaacctagtcattaaaacctcccatggaacttttgcttggtggcatcttggattgggagaagacaacggtcttcttgtctgtcacctacacatgtcaacggttgagagctataaatcagtacatccaaaaaaattgctctttccttgatgtaatcccaaacgtatccaacatacaaatgaaattagcttcctataatttagttgtcttgttcacatacctcaagataagcttcttccaagacgccattcccaaagaataaaaattagaagatcaagaaggagcagattcagttttgcctaagtctcattacatcatcacaatcgtctgttgatcaagtgttccactattctttccagttttcatttttaaggcacttcaagagataatgccagctggttaattctggtgctcatataatacatcacaaatgcatgagacagattggataagtatagctacatatcaattagtggaaaatcattgatgtttgggtgcatttttattcaattcaactattctgatacaaaacaattttttaagaattcagccaaaaatgataagttcctcagtcatataaaataattggctaacttcagttcactgtttaatggttttcctggattctgtagagagctacagtcagcaaaggtgacacatgcctgagacctggagccattactcactcagcaaataatcctatcactgggctcacgggagaattatctttcacatctgcaccttcaacaggcttgtcccacctcccaagcaaaaaagggaaaagaaacccgagtgaagcatctaaggcattagttctttgacatatgtaattttttacctgttagttttttgcaacaagtgccaaattctggcttgagttaaacatagcatctaggtagtaggagcacaagagagataagaaaaaggtaagggcacagtgaagagctagagtttatcttgaattaaggacaaaatcaatttttaaagcaccaagttggtaaattaacgtgtgtgtgtatgtgtgtgtgtctgtcggtctatctgaatttcaatacaagcacaaagtattaggtttttctttatttccactaaagacaaaacaaggaattgacaaatcatttctcaaaggattaaggttaaacacaaagaggtcatcctgacagtgttgatggggcagacactggggatcgttacctaggagagttggggaatttctcttcctggggtgggttgggggaggggaatggggaaggagggactcacctctagatgatttcggggcagtcttggccttggggatgtgacaacgtgttcaatcttccaagatccattccatcttaggattccaggataataaaggccgaacaaaccgctggtgtcaagataggtcacattttgtctgaactttctcaacaagagtgtttgcatttccagaagacctctagctgatattgtgatcagcgcagggttgaagcaatataaagttctattcaaatgatgttacatttagtattcatctagtgtcattcttcagagaagcacattttgcccttcaaaaagaactcattcatcttgacaatgttcttggtcagcaggtattattatgataataccttcagtttatttagcaaccctcaccccttttcaggcgaggtcaaagccagtcaggcagtcagtcaacaacattgattgaagtctcttagtgtgtagagctgtgtattaaatcaccgtcaaacaccagccagcccagacctcaccgcatacggagcacacctttgaggctggcaggccacgggctgaatctcgccccgagaggccctgcaccccagcctcctagagcctcagtcatcagctcgtatttactcacatttagctcgggttgcagcaaacctctctacatacaaacttttggagacttctcctctgcagactctgtctgtgcctgacaagccacaagcatcctcgccagggttcaggcagcttaagctgcccacgtagttaaaagcaggaagcacaccattgcccagaaatggaaagagcagactgacaaacaaaattagctgaacttttttaactgaagaaaaagggaaggtggttttctgagaggtggtgagcacaggttctttccccaaatctgtttgcgtccgggttggagtataccttggactctggcccagctgctcaattccctgcatcttacacaggaagacaggcaagggcccagttggggaggggacatatgctcaaatgacacaggaaatacaagctgattgcccaaaaactaggagatagagctaggcaaaaaggaaaaataattaaatgtcactggtaatgacacacccccaggtgccatcacttctcgttgagatgaatgtccactcaagccattgtcctgtgtgtttctttgtgtaactgaaactacattattcaaaataggactattttacatacatgtcatcacatgaagcaaattgtccccttttagagtgccctttgaacttctgtattttcccacatacaccatgcatagcacgcctgttagatttccaaaactgctccctgagaaacactggtgtttacttaggagactctcaagtaacaagctgaaaaaaaaaatccagttttacaaaaaattatgaaatgccaaaatgtaaatttattgtattttaaaaataacaaattatgtgttacttttataaacaattttctatccagttttttacataaagaatattgtacttttgtgttctaagtttaatctgttagtaatttccatgatctgtaagtacaaagactcctcaaaagtagcctaaatgtcaatgttttaggtggtatgggaatgtcaaaaatcctcctggagccaagtgtggtggtgtgcacctgtagtcccagctacttaggaagctgaagtgggaagatcacttgagactaggagtttgaggctgcagtaagctatgattgagcctgtgagtagccaccatactccagcctgggtaacagtgagactgcctttaaaacaaaacgaaacaaaacaaagctctttcaggacccaggttcttctagctctccacgccaccatccccagtgggtcgtcttgccttcatcatccaagatgatgctctttgttcattctaggcagcaagaaggggaaggagggctcactgctcatgtgtcatttccattcacactttactaacttaaactagtccatggccactgctggctcttaaggactacagagcatgtcacttttgattaagtgacaatgtgtacagataagaattagattctgttactaaggaaggccagtaaatgaatattagagatgaatattagaggaataacctacagtctctgcctcattgggtgtctgaaagtttaagaaattttaagttagaatatcacttaatattggtccctagggaattcgatttaaagatcactattaactgaaatccatagaaaataccgagacctcattttaatgaatctgcatttattttcctgtccttcactaacaggctaatccaagatggtggtgctccagctctgtgcctctggatttgaaagcttggagtgtagaagacttccatggagggtggagagggagctgtgagctccaggctgcggccgtccggtataagagcctcagctgatctcatgagagcttggctacctatgaattcccctctatgtctggcaccagaacatggcaagaaaaaaagtagttcctggaaatagttttctccaaataaagccaacatgcaaatagttttcaatgttcattaacattaacctagcttccccagtttgggatatttgggacttaatgtggagtattaataacttcaacttttattcatcttacacaagcttctaaaaagatctaaaacactaaagatctgagagtatttcctactgtttgaaataagtactcagcaaccccgagttgtgattttactcttttatattcagctctctctttggcatgatgaaaatcctgggctcacttcatttatttatttctttgtttattcatttgacaggcatttgtattgagcactttctatggttgcagattggcttcttcaggaaagagacatgaggtagagtttttgaagaatggtgtttattaaggagtaccttcagggccaatgccatgtggagagcggggaggaaggaagcaggagtaggcagaggaagcagctgccagctcaccagtatgggaactgctgggaccagaaaaaccttttaaattgctcagatcaaggtggccaggccaggccattgttcagatcaaggatgcctaccaccatcagtcctgggatgtgagtctccctgggaatggccctgaccttggatgaggcagctttctggaggcaagccacctctgaagggctcagcagctgtagactgcctgcgccagaacatccagtagctaggcaacaaaacctttactgaagagggatcggggcagagcatccccctcaaaggtcctccttagggtttcatggcagtgtttgttatagtggcttagctaaccataagcactaacctgcagtgcatttctctttcacatcacagttcctgtgtgactcgcctaggtggcaggagtccagggttctttccatgttgttcctctgctatccacaaggacgtcatcaacagccctatggccaaggtgcgatggctgctgtggtcaggtttcagacagtgagagggagacagtggagaggtgcatgtcattgtcctaaggcctgctcctgaaggcgcgcacttcacctccactcacattccactcagaacatgtggtcacatctgcatctaactgcaagggagtctgggagatgttacccagttgggcacccatgtgaccagttccagatcccttactgtggaggaagggacaaatagattacaccgggcaacagccatctttgttacaatggaccggtaattccacttcatgatagcctctgcacacattttgcatgtacaccatagggatttctgtcttgcagactgtatgctccttgcacgccacacgtcttatgtatctctgcctccatcaggcaagtggcacagttatatggcactgttctgcacctggaatctggcctacatctagtattacattgtattgcatcttggtaagaactgtagaggtttaatcatgcccttgtctggtcccgccctcagagcttctgatatcattggtctgggttatagcctaggtaattgggtttttaaagtcttcccaagtgattcttttatgccaccaaagttattaatggctggttaagaggaaaaatgggccaggtgcagtggctcacacctgtaatcccagcaactttggaggtggaggcaggaggatcatttgagaccaggaggtcaagaccagcccagtcaacataatgaaacccccatctctacaaataatttttaaattagctgggcatggtgtcgcagacctgtagtcttagctactctggaggctgaggcaggaagattgcttgagcccagatgttcagggctacagtgagctatgatggggccactgcactccagcctgggtaacagagagagacccaatccctaaaaaaaaaaaaaaaagaaaaagaaaaaaagagaaagaaatgagaaagaaatgagcttctagatcaattagcagtgtgtgtgtgtgtgtgtttgtgtgtgtatttgtgtgtgtgtgtaagtgactaaaattctcatattttagttcaagcagatgagggaagttaatggctcatgagactgaaacttccaggaaggtagatctggctttaggcatggcttgattaagcaactgaaatgaagtctctagaacaaggtctatcttcctcggtctttgtctctctcctgtcccctgccctccctccctacttccctgtctctgctgcacctcctcatgtctttccctactgaatttgactaggatgctaagatgctatccagatgcttttcagattaagtccagcagaaaaaaaggcttccatttgcctctttggtttactgtttttaatcagatatgtcatatgtacaaaaggatgtgtgtcatgtcaatatatgcttaaaagaatgataataaagtcctgtatatttaccatgcagattaagacacaaaacatcatcctactttagagatccccactgcaccctcccaacgcaaggtgccacagaaatgtcattcatttatcacttagttttgtgcagcttttgacttcatctaaatgaaatcacaccatatatattcttttgtaagtggcaaacacattgtggtatttctcaaattcatctacattgatgtgtctatctgtgttttattttcatagctgtttagaattacataccttaatttatttgtttctctatttcatggacatttgggtttctgttttttgttgttatgatgatgattgctactgaaaacattattacatgagtttctccagggtacttaagtaggagagaatttgctgggatgaagagtatgaacatcttcaacagttttaggatctgagaactagccaaccaatatccagatatagtaatactatcagtttactgattcccaccagcagaacgtgagagatcccctgctcctcctcactgccaagacttggaaatctcagatctttaaatatttccctatctgttgggtataaatctcattttgttgtggttttaactttatctccctcctcttccttattattattattatcagagacaggttcttgctcttttgcctgggctaggatgaaatggcatgatcacagctcagctcactgcagcctccatctctgggctcaagtgatcctcctgcttcaggctcctcagtaacaaggactataggtgtgagccaccacacctggctaatttttaaattttttgtagagatgaggtctcctatgttgaccagactggtctcgaactcctatcctcaagcaatcctcctgccttggcctcctaaaatgctggaattgcaggtatgagccacagtgcctgaccgtattattaattaaagcattttttcttttgtttgcttattttttttctatttattttgagaaaagtctgttcatgtctttggcctccttttttattgagttgtgctttatcttattaatttatatattcagagtgctctccttttgtctgttaaatatgctgcaagtatcttctctcagttggaaggtttacttttgttgtcttttgaaacacagagatgtactgaactttaatgtactcgaattcatcaaactttaataatttatacttttttatcagtttcagtaatcccatagtctgtgcttatatctctttctatagcttcttaccaataattttaaagttgtattattttcatttaggtatttaattcgactgtaatttacaagtggtatgtaatagggaacaatttatttggcctaaatgcatacacaattttcccaacacatttattgagtggtcctgtggtgagtgaccttaaccttcattgtctgtaaaatgggggtgataacaggaattatctgtgcttgttttccagtgccatgtaacaaatacctccatatcttgcagcttaaaacaatacgtattatctcacagattttgtgggtcagggatttggctgtctctggctgaaggtgtctcacaaggctgcaaagcaaggtcctgatggggctgtagtgtcctctgaatagtcacctggggaggatcctcttcttagcttactcatgtagttgttggtaggttttagttcttatgggcaatcaggctaaaagcctcagtttcttactagctgttggccagaagtctcccttagttctttgctatccaggcctctctgcagggcagctcacaacatagcagctggcttccctcaaagtcagtgaataagagagtgaaagaggcatctcaggtgtcatccacagcccttttatatcctcatcttgaaagtgatatcccagggccggatctgtaatcccagcattttgggaggccaaggcaggtggattacttgagtccagaggtttgacactggccttgaaaacatagtcagaccccttctttacaaaaaaattaaaaaaaaattaactgggcatggtgggacactcctgtggtctcaactactcaggagactgaggcaagaggatcacttgcgcctgggtggttgagactgcagtgagccatgattgtgccactgcactccagcctgacagcaagacttggtctcaaaaaacaaacaacaaaacaacaacaaaacattctatcatggaccagtgttagaaacatccttgaactggagttggaattttctgcttcagaaaaaaaaactccagaccccatctcaaaaaacaaacaaacaaacaaaaatttaaaaatttttaaaaaaggaggcaagaaggagacacattccacattccatttcttctgctattctctatttcttagaggttatattctcttcctaataagtccagctcccattcaaggagtgagggatatacagggtgtgaatgccaggagatggtaaccaatgggagactctgtagacgctgccttccacactagttcatagactttctgtgaggattcaatgacttactatgagaaaggtcctgagacttccacggactatagaggcacttaggttagcatttgctgctagcattttgtctatcatctcgctggcttttgtttcacacaccaggtttccatatatgcgtggccaatgtcttggctccattagacctagtcgtttatttttctattcctgtagtgtgatggttaattttacatgtcaacttagttgggataaaggatgcctggatagctggtaaaatatttctgggagtattggaggctgtttgcagaagagacgctcatttcagttggtaaactgagtcaagaagatggccctcccctgtgttggcaggcattgtccaattcctccagggctagaacagaacaaactggtggtggaagggagaattcactcacttgttgatctgggatatccatttctcctgttctcggccattggagctcctggttctactacatgtggcaatatttggaattttgatttattagtctgtataacattaaagtctcaatagctggtaagggaagccctccagcatccattttggccttgctatttcttttcatgagattttggctaatcttggccccttggtcctccatctaaatgttggagtctgactgcctgcagcacacattggggtcacattcctatgccttagagagaggagaagctgggtgcgaagatgatgccagttgctttgctggaaacatggggtggctctgctgacagagggcagagtgaaagggggtgaagcatcttttccagcccccgctactaatagaccactgggagctacggcagctgaaggttcaggcatctcagccttgtttcccagcaaagcagtgacagagaatgtgtaggggccagtgtctggcggtggtggaggctggtgcaaattattagcactgtgctgctcctcattagcactgtgggactcctctgttttgtctcctgcttgctccttgtcccactgcccagtattgcggaggcagatgattgagtaagtggaaagaacaacccctggggaataaactgactctaaaatttcagcaaattttaaaattcaaaaatctgaagttgttatagattcagttgaacaagcagagtgtagaatttcctttcaaattttccttttcatattaagaagtgaccttgaggagaactgcagttttactgtgcccacaaagtcacaatgcagttggggagctgaagggttgttgcatcccttttcagatgtttctgataaaacacaaataggaaagccattgacacaaggcctcaaatctcttttggaggaatataaaacttcaaataaatgcagagtaacttctgagaatctgagatatttcaacaagtgcatgtaccttttatgaggaactgagtggagatttgtgatggaggaggcggggttcccccagtggcctggcatcagaaaatggtatggaaagaagagatgctcttcattttgcatagcatcttcctggtctgtgaagctagctccatagtactaatgatgtatgagcaggcatgatagggaattaccacaattacacgtggtaatatttactcagctatttgaagaactccagagctgagtctttgctaattagattcgccacctaatggctattcttaattcatgaaaaacattttcagaggatttaatgatctggatcaagcagaagtgtggtgtgttgcacacacatttaaatgactcctcaaaaattgcaggggctgggccggggagatttttatcacccaaaacccatttggcctattgaaatcagaattattccctcaacttctgtaatgctgccctaccaagtaatagggactcttcttgataaaaatgatttgggaaacaaaaaaagggatagaaaactctatttattattttatagttacacggcattatactagaccaaataattctcccttaattagctttgctggagaaaaacaaagaaaggagagtgattagagaagacagaaatttttatacataattttaaactttttattaaggcagatttccctttgagctgttagaaacctcactgtctttgttcttacagggaataataaagaaaccagggaatttcagacaaggacaaaaatgttccagcctccctttggcgggaggtcagcagttgtgtcctgtggtagctgagtctgcaagggctgggcagagacagatgtggaggctctgctcagtcaggtcaatgaccaaaggctgcatttgacgtcatcttcacgctctgcagaggagacagagttcttatgtgcattcaattaaaaggagccaggagaaatgggctttaatttgagcagaagaactttcatagggataaacctttgcattggttcagggatgggacaacaagataggtaggtggtgtaactataatgattagtaatgtggtgtggggctctctgtccatttgtctggagatcctcaggaagggaacagtgtgtatccaggtgccccttgggttgtcttggatgaggtagaggggctgcctctgctggtttctcctggtttttccagattgtttcattgcatgaagcatctaagaatgcactgtgtggatggcatgagctccttattgatttcactttcagaactgatcaaattttcctgtctcttaaccttctaaacaccatcagtctcccacttcttgcatttataaaatgtgtcacccaatgcatttctatgctaatgcagttgttaatggcgctagacaggaagtagtttcttctccttcacagacaatttagagctccccccaagataaacacacacacacacacacacacacacacagatagatagatatgtttattttatatatatgcaggtgcctatgtgggcgtatatggcttttgatttctagaacttatgagcttatagttagtagacagtaatttaagagccaactgggctaaatattatgatggtcaattcaagtttttctccctggccatgagaaaattattccttttatccttttcacaatagtttgatgcaccacacacaattaaacacatcatataaatgactaaaataagttagcatttgtcccaatcttgtcatcatcatgtcaaagaaaataacaaaacagcattattcagcaatctgaattggctgctttaacaagctgagttgcttacggagactgaagctgaaaggtagcctgttctgggattttctttctcacgaaagtaaaagacacactctagtcctgtgcatccgtgcatttaagtgtgtgtgtacgtgtgtttgtaaagacatcaaagaaaagctgaagtcaacgtttggagtcaggttttgcatgtgaatccggggcctcctttaggataaaatccttaggaagacggccccatgtctttctgccttttccccccaacaaatcctcatcgtaattatttgttgtcctgcacttctgcatgctggaatcagtgttggcatgacatgattaaacacagagcaggcacatttggcaggggctgggtgtggatacacacactgcagaaaggccagctgggccctgccacctgccgctcctggtgatggtgtttgcttggttccccctcccagctttgggggtgactggctgttgctggagataaaacgaagccaggcaaaatgttttgacatcttgaaaggtttggcaattcacctggctattttacttcttgtgtgactttacacattcttgaatatttacttattcttgaacatttattttcaacctaccataaaccttgtaattttatgcacattattaatcttactgtaaaccattcaaccaagatttgtagtaggttttgccaaatagtacaaaggaaacatcggtttaataaatgaaaaggcagaaaataatgagtgtgcaattcttcaaatattgctcacttttttgtaaagcttgcttgatttttagtcatagtaaaatttatgctatgtacctcttcaatttctttattttgtctggaagtgccttatcagaggggattaaaactaaaagctaaaaaatgaggtttaaatactgatgccatggaagtttgaggcttccttgatgtggcgcgtgttctcagctccctggataactcaaatactagagagccaaagggagcatcaactataagaacttactgtgaggcccacaactctactgaacatttttcatttttgatttaggtaatacatgcaattgaaaaactacttctttgtgaggtctatataccaaatatcacttcagatcatttctttttttatatatagtatatttttatcgacataattgtatgcttttttttgacataggtttagaaaaacattaagcagagaaaaaaatcaaatatgcttggcacctaaatattcacatttatgattttgatttatttcccattgttttattttcctctagtcactgaaaaattcttgaataaaatttttttctttttctagttttatttaatgtgaaaaaggccaaataatatatttaagccacctgcactgcaagtgtgtgaaataattccagctttgatcagagttttagagtttcaatttaaaattattcagagagggttaagtgataatgtttaacattcatcttttgtaaagcttgactgtttattcctctaaaggacacaacagtggaaaagcatcctgttttaaaaatggaggcaacattgcagtctgcacattgatggtgtggaactcatccaatttctgtttaaatgtattaagggagaatcttaaaaagttatatgatcatgaatacaaaagtataatttaaaacacttatcccatgagatatttaaatacttggccaggcgcggtggctcacgcctgaattcctagcactttgagaggccgaggtgggtggatcacaaggtcaggagttcaagaccaacctggccaacatagtgaaacctcatctctactaaaaatacaaaaattagctgggcatggtggtgagtgcctgtcattccagctacttgggaggctgaggcaggagaaacgtttgaaccagggaggtggcagttgcagtgagctgagatcatgccactgcactccagcttgggcaacaaagtgagactttgtctcaataaataaataaagcgatatttaaatactcactacataaaaaaagggttccatggttaagaaagctcgggaatcttggtgtcaaataagagtaaaagggcctccttcctataccatgactgctcagaatcgggaatgtgcttatgtgttttgaaggagattgtgagcctcaatagtctccaaacacaaggatccagataattgttttccccttggagtacattgagggacaacgattttagagaacatgccttgggtggaaaaatatgcatgtatttccaaaccactgtgcaaatgtatttttaaggatgggagttccgttttactttgattttcacatgtttactttgtcgtggtcattgttacatttaaagctgagttcccacaaaaatattggtgggctctggcagttgcattggctccgtgggtcatagagtgtacccatgatggttaggttggcaggtctttggaagtttgaatgatggttccaggcatggatccgaaattctgaatatgaagaaacccttagttgaaaaaatcgactctttcacttaagaacagtccctttggaagttttcattaaattacttgtttcagattttgagtatatatactgtgttatttttcagatattatttttaggcttttgaacagagagaaaaataaaacagagactattttacctataaccatgtgtgacttttaaagcaacagttatatctccagagagatttcagaaggtggcaataacatgtttgccatgctatagtgtagtgtactaagcaagtcatagttgatgttggtgtgcactgctatcaaaggatatgacatagtttagatacttgcctgtaataagtgtaccttgccttgcagacaatattgtcatcaatttaggaaacatgcttcagtgaagattaatttggaataacctataagcaaaatgactgtgtggtttatgaaaaaatatgaaaagactaaaaaacaaaataaatagcatgcatctgttgactgtttgctctagctcacgtgatctcctcggctttgataccatcgcctcacacatttagttaggtaaacatgattcgcagagggctgaacgcatctccggaaccagacatttggcattaaaaaccaaagatcatgtaattactaaagtgatcggatcaggctctgatttcatttttaagtgcttgcttattgtttcttaatagtttcattggatatttcataaacatttactcttaataggttggtctatatccggagagcacttgtgggcagtactgttcagtgaacctctgcttctctcctgcacagtgtcttaagttggccccaggagcagtgtctgaaatagagatagacagtctgatgcctgggattgcctggggaagggctctcaggagagcagcgtttgggaggaggtgaagctggctgagaaaagggaaggagccaagcaagggtgtggtttcaggtgccctccaagagaaagaatgaggcaggctaaagggatgaagggaaaaaatctagggggaggaattttagattcaggtctttctgaggggtgagatccaggcaggatccagatgatgtgaatatatgtgggcagaaagtaccccaggcagagggaacagcatgtgcaaagaccctgaggtgagcacctgtttggcgtgttcaaggaccagcaaggagaccactagggctgaaatagaaagaaccagagaagagtggaggaaaatgcagcaggacctggtgagttgcggcagaaaggagaattctaccctgattcattgaggggcacacaatttccagtgtgaccttcaacttctccacatgcccatcttgtcgtctataaaataagataaagagctggatgttctcccaagtcacactagccctaaagttctgtgattctaaaatgaataagacttacttcctcacctgtcaaatgaagacgagttgctcttaaacctgaagacaattaatagacaatgtgaaatttcccagaacaagagcccatgacattgttgtggaagggggaattgttgtttaaaagcttagtgccatttaggaagcaaactgaggagctcagtgtcccagaaaccaacctaatggtgcaaggcaaatcatgggcatcattttcttcctgcctttgaatttgagctttgagtggtagcataaatggaggttcacaccaaattgtttggttttaagatgatatggtagcagaatgatatgaaaaggcagatatatcaagaacattcaggaccttctttgttgagatgtaattcacacaccataaagcttacccttttaaagtgtaaaattcagtggtttttagtatattcacaaattgtgggattgtcacaatgatctaattctgaaacactgtcatcatccccaaaagaaaccccttacccattagcaatcattccttattgtgctcccccgctaggccccagaaaccagtaatctgcatgtcctattctgaacatttcatataaatggaaccataaaatctatggcttttgtgtctagcttcttagttgcttagcataacttttaaaaggcatatccatctattaacatgtgtcagtacttgattccatttttactgatgaatagtaatttcattgtatggatttaccacattttgtttacctatttctcagctgatggcatttgggttttttctgtgtttctgtgctatggataatgttgctatagacattcatgtgcaggcatttgtgtggacattgttttcaatttttccatgtgcttacaggacatttgtatatctttgaaaaaaatttcaaatatcttgccaatttttaaattgcattttttaattattgagttgtaagtgttctgtagatgccagtcctttatcaaatatataatttgcaaatattttctcccatctctggttatcttttcagatccatctatttatctattctgttttattttgttgcttctgctttagttgttgcatttaagaaactattacccaatccaaggtcatgaagattgacacctatgtattcttctaacaattttatacatttaggtcttctaattaggtgttttattcaattttaattaatttttatatgtcatgtgaagtaagaatccaacttcattattttgcatgtgactatctagttgtcccagcacaatttttatttatatcaactaatatattttatttaaaaatttatttttggagcctgtaaatggataaattctaaaattacagcaatacagagtatttaacaatatttaaatatttcttcttactcagcctttgcttgcgttttgcgttttgctttccataaacaaatatgctggatgaaagcagcaatatgcctatctttaagttcaatgcatgagttccttgaaagccatttcaatttggagtttaataattactgaacttcacgttattctgtcacagatgataatcaagtggcctacctaagtagtataaatcataaaactataatattataagctaagtcaatggaatttataaagtcaatgtaaaacaaaaactatactgatacacatgtgtattgggccctattagaaaaatggcaaaatcacaagttttgtttaaaaaatgaggtccttgggcaaagaggaatgaggagtcattatcatcaaaaattaagaagattgtaggtaaaaagaagtcagcctacaattttaattaagtaaaggaggaagggatagtacatcatgacagttgataacagttgaggaaaattccattaccattctatcacaaaccggttgactacctcaaaagctcagaattaggcacttcaggcattctgttactctcccactaagtctctttacgtgggacataaacctgcacatatgacaacaacagaatattataatgctctgtaatctgacagcaaataatagaaaaaaattaatggaaccacattatctcactacccttgaaaataggggctaaaatgagtcactaagaaacagttttcaaagagcactgcattacctaatgtgattaatacgacaaacaaaattcagcatttttcaatggaaaaggccatatactgtatttgaaaattaggaatgcttttgatgctgatttttatcaaagtggtactctaagccattgagttggaacaaactctaaactcaaaattagttgtgtccttctatttaataaaccgatagatgacaaaaaaggcaaatgaagaaaacagcatcgtgtatcacagcagctttgtttgtgctatagttcttgctgttttgtaatgtaagtacaattcttgtacttctttgttaaatttatatccatgtatttatttttgatgctattataaataaattttttaaaattttcattttcatattgtttattgcagtgaatggaaatacaatttatttttctatgttaattttgtatcttgcaatcttgctgactcatttattagctcataatatttttgtagtgtattctgctgttgttgagtagtgttctctctatataggtacatctattaaatctatatggtttatagtgttcaaattttctatttctctatgaatcttttgcctagttgttatatcactattgaaatgggatgttgaagtcttaagtttttatttttgaattgtccatttttcttcaattctttcagtttggggttttattgttaggttgatctatctttataattgacagatcttcttgaatgagcctttatgattataaaatctgttcatgtatttttactaacaatttttgtctaaaggtctatttcacttgatattaatattgccattcttactctcttatggttatatctttttccagtcttttactttcaacttgtgtgtctttcaacctacagtttcaatctacaatttctgttagcattttgttggatcatttcttaatccattttttcaacctctgccttttgattggttgttaattcagtcacatttaatgctataattgctatagttgggtttatgtctgccattttactttttgttttctatatgtctcatgtctttttttctatttttaaaataagtatatatttttttgtgttaaatattttcagtgtatcatttgtatttcttttactatattattttgagttattttcttagtggtttccctggggattgaaattattatcttaaaacaatcttgtccaaattaatatcaatttaacttcaatagtatacaaacattttgctcttatataacccattccctctcctttatgctattactgtcatacaaattacatctttatacattgtatatatccctcaacatagatttaaaattattgtttaatgtagttgccttttaaataagataggaattgaaggtgttacagaaaaaacatacatctcaactactttttatatttgcctatgtagttactttgtattttgtttattcatgtggatttgagttactgcctagtgtctttttattatagccttaagaattctctttagtatttcttgtaggactagaagcaaattgtttatctaaaaatgtcttaaccttaacttttgaaaggtagttttcctagaaatagaattcttagttgacagtttctttctttctttcagcactttgtttttttttgtcttttttttttttttttttttttttttttttttttttttttttttttctgatacagagtctaactttgttgcccaggctggagtgcagtggtgcaatctcggctcacggcaacctctgcctcccaggttcaagcaattctcccactcagcctcccgagtagctggtattactggtgtgcgccaccacgcccggctaatttttgtattttcagtagagacagggtttcaccctgttggccaggctggtctcgaatgcctgacctcaattgatccacccacctcagcctctcaaagtgctgggattagagatatgaaccactgcacctggccttctttcagcactttgaatgtgtcattacattctcttccagcctccatagtttaggagaggaaatctgtggataatctcatgaaaatcccttgtgtatgatgagtagcttctcttgttgtgcttccagaagtctctttgtcttctgattttgagagtttgattatgatgtgtctagggatggatctctctgagattattatatttggtgttcactgagtttcttggtaatgtagattaatatttttctttaaattttgaaaaattttggccattttaaaaaaatgtctttttaaaaatctttctttccttcttcatcttctgggactttcatgatgagtatttggtatgcctcatggtgtcccacagatttttgaggctgtgttcatttttcttaattcttttttcttctcttcctctaactggctaatctcaattgacctatcttcaaatatgttgatttcttttcttctgccaggttaaaattgctgttgagcccctttagtaaatttttaaattttagctatttttttactccagagtttttattttgcacttaaaaaatatttccatctctttattaatattttctttttcatgagacatcattgttatactgtagttcattacacaatgttttctttagttctttgaatgtctttcaaatatctgaatttaagtatttgtctaatgagcccagtattaaatacctggaaccaggaagtttcccagcccttcgtgaagaatctttgtgtgtattggtacatgctggtgccttagccttcatttcctacttgtacagagcctcgaggtcatccaaacatgatatctcagggccttctcaggttttcccaatgtgggtgttcagccctaagctgtacatggccttctagattcacgggtatatgtaagagcttttcaaagtcccctagaagcaactcatgacttggcttttttgttaccctgttgtttgccccagctcttctcttctcattccctcatgcagttgcagtattttcaacactcgccactgattgtttttgacaaatgcccccaaagaaaaggctttttgcactggtggatgtatgggaaaggtagaacaatgatgaatctgtgattgtgctttaccaggaagcttccagacagatcaaataaagacagttttctcagaatgaagcgttacagtaggctttcacccattctacttcctccagtgcctgggaggatgctggttttcactattagtgggaaattattgattttcaaggctactgcagggttggaaagaagggaatgggaataagacaaggtaaaacaccttataacttactgtttttattaagattcagctacttttcttgaatatattttcctcaaattgaagcaagcatttggttaattttcacagtcctgaaaatgttgattttgaccatttttgccagtgttgttcttactttaattgaggaaagaattttctatgcttcttaatttgccattcctgctgatatctctctataacatattttttaagaagcatgttgccacacaattatcttttatccaaagatttttcgttagtggggaggttaattgtagcaatgggtgaagcagagccaagcagctcattggtggaggtcactcaggatcaatgagagaagaaagcatatagttagtgtgcacactcaccacgcagaaaacccaaatcattcgggaaaagaaataagtgaaatttttttaagtaattggaagtttctcatcttgaaaggaaaggggataataatgcccatcatatgaatggctggcaatttataggaataatatggaatatggatagcactttgggccatgaattgtcagtaagtgctagtatttatcttataaatggaaagaataaataagcaagtcaatagaaagaaatgacaacaaaacgtttttttatatttgtggttatatagctatgaatgtatactttaggctctgggaagaaagtcacctaatattgtggagcctattgcctcttgagatgggttggcggtcagtgttctgaataagttattccacccagcacgagattctggtagcgctgagctcgccaagttctttgcataaacatcagttaaagacggccaatgtgctgccaatagacaaatcagagtgaacatctttttgtggctggcaggagtatgagtggtgggaaaaagaatatattgggagttcctggtgagtgaggaggatgaagtgagaggcaatacacagttagcagggaagaaacattcatagagtgggaggatgggtgttgactgccatcttggttcaatgggaagctgagcttttagagtggatcaagctgaaagtactggttttgccacatggtctgtgttgattacttgatctttaattgctcagatcttctaaattatatcaaagattttaaaaaatataattaacaacctggaccaattttatcaatttggtgaaattagaggtgttgttgatgttcttttgccctaaaatattctaatctggttgcttttcatgcatttaaagaaaaattaaaaaatacttggttgatatatttcttattcctacatgtcattctgagtaaccatggataagtgtctgttaatttagcacttaagatggaggcatggtgatttatctaaatgaaaaattgtttgcttacataattaaaatgcaaacaggaacactcatattctaattacctttcagagaccatttgggggaatatttatgataactaacttgctttccgttggctctttaaacaccttttaataaaccacaaaatagtagattctaagagtatctttcaaatgacataaaatgtgtttataaagagtaaactctgtttccccccagacttttactatcttagtcttcagaggaatcccagtttcatagcttttcgggcatttttctttttaaccaatgtattaaacagtttgttttacacacacacaccacaaacactgccttttactgacatactgcactcattgaaaaaaaagtatatatgtgtatgaatgtatataccttcattatatgtaagaaagaatgtaatcatacattagcagtctcctcaaagccctctggtgtcttccaaccttagactaaaggccggtgtctttaaaaagcttacaaggccttacaagatctgtatgtccaccccatcttgcctcacccactgtgacccctagttcaccatttttagacatggtggactctttactgttcctggacataccaggcatattcctgccttaaggtctgtgcatttgctattccctctgactgagacaatcttgccctatatattcatatggcaccttttctcttcttttttgggtctttgctcaaatgccactgatcactgaagcttcccctgctcattccttttattattaagtagcaatcttactcccgctttcagtttccctgtctcctttccctactctgcttttcatggaagcatttactgccatttgttacgctatgcagtttaccctcttatcagcttctccaacaagagtgcctgctccttacagcagctggatctttttagttcttttctgtgtcattagcagcccgaacagtgcctgctacacaatagatgtatagtaaatacttgacaaatgagtgaatggcagtctcaagttttcatatttaaatcccagaggttggaatatgatgaggaattgtacctataaattactgtagaaagatgaatattagttcagtggtattttgatcaatagaaaaggccatctgtggtgaagttaaattgtgaactgctgctagattagaaaacaaaacctaggacatttgtgttatgtgtaggtcttgagcccatacttcaaccttcctgctctcatggcttttgataactcttttgcctttcccagaaacgtgggtttgggaagttgctatgtcctggaaatcacaaagtatatatttatcttgtaacactgccttcttggtgttgcataaatgctagaagcaccatccctctcatgaagactttcacctttgatgcctactgcctagaatgcttctgactgggtcttcacttggctcattcccaccctccaggtatcggctcaccggccgcccttgcagacttctccaactgtccaatgcgtccctccgtttttcagtaccttatcaccatgtgtattttactttgagcattcatctctaatatatggtttgcaatcactttaattacttatttgtatccatgtttgttgtctgttttcacagagtagaatgtcaactcatgagatgagagatcttgtttcagtgcctggcctacagcattagctcaataaatatttattgaatcattgaatgcatccagactttcagaaatgattcctggttataactcaggattacaaatgactttgcttcttgtaaatgactattaattttgacatttatacctagaatatggtggaattgtggggtctctattataagtctacgtgtacattttaagtacccttttctttatatatttcctgattgtagatattacatgttctagttgtaaaaacaaaacaaggctgcagaaatttataatgtgtaaaataaagaactgtttattgccaactctcccagattaaaatgagattcttttgataaactaattgtaccttgttttcttcaaacttaaaatatgcaatggaactcttttcattttgacattttgtgataaactttattctttttaagaacattgtactgtgtggaatatactatatatttagccatctgtggtgaggctaaattgtaaactgctgctagactataatacgaaattgaggatgtttgtgttatttaaattcatttaaacaatttcatattagtgggcattcatcttgttgccagtgggtttttgggtcagtgtaaaaagttgcagtaaatttacttctacatctgtgtatttttctgtaggaaaaattcagaaaagtacacttttgtgtactgtattagtctgttttcatgctgctgatgaagacatacctgagactgggcaatttacaaaggaaagaaatttaatggagaaatcacagttctatgtggctaggaaagtctcacaatcatggcagaaggtgaaaaaggtacatctcacatggcagcagacaagagaagagagcttgtgcaggaaaccccccctcttataataaccatcagatctcgtgggacttgctatcatgaaaacagcaagggaaagacctgccgccatgattcagttacctcccactgagtccttcccacaagactgggaattcaagatgagctttgggtggggacacagccaaaccatattattccacccctggcctctctcaaatctcatgtcctcacatttcaaaaccaattatgtcttcctagcagtaccgcaaagtcttaactcatttcagcattaactcaaaagtccacagtccaaagtcttatctgagacaaagcaagttccttgtgcctatgagcctgtaaaatcaaaagcaagttagttacttcctagatacagtgggggtacaagcattggatgaacacagccattccaaataggagatattggccaaaacaaagggactacaggcctcatgcaagtctaaaatccagcggattagtaaaatcctaaagctccaaaatgatatcctttgactccatgtctcacattcaggtcacactgatgcaaaaggtgggttcccatggtcttgggaagctccactcctgtggcttttcagtgtacagcccctccctcacagctgctttcacaggctggtgttgactgcctatggcttttccaggtgcacattgcaagctgtcagtggatctaccagtctgagatgtggaggacaatggccctcttttcacagctctactaggcagtgccccagtagggattctgtgtgggggttctgaccccacatttcccttctgcatttctctagcagaagttctccacgagggccccacccctgcagcaaacttctgcctgggcatccaggtgttttcatatagcctctgaaatctaggcagaggttcccaaaccccaattcttgacttctgtgcactcacaggctcaacaccaggtggaagctgccaaggcttgggacttgcaccctctgaagccttggcccaagctctacattggcccctttcaggcatagctggagtgactgggacacagggcaccaagtccctaggatgcacacagcatggggaccctgggcctggcccacaaaccattttctcctaggcctctgggcctgtgatgagaggggctactgtgaaggcctctggcatgccctggagacattttccccattgtccattgtcttggggattaacattcagcttctagttacttatgcaaatttctgtagctggcttgaatttctcctcagaaaatgggttttccttttctatcacgttatcaggctgcaaattttccataccattttgctttgctttccttataaaaccgaatgcctttagcagcaccggtcacatcttgaatgctttgctgcttagaaatttcttccaccagatacactaaatgacctctctcaagttcaaagttccacaaatctctagggcggtggcaaaatgccaccaggctctttgctaaaacataatgagagtcacctttgcttcagttcccaataagttcttcatctccatctgagaccacctcaccctggaccttattgttcatatcattatcaggcttttggtcaaaaccattcaacaagtctataagagcttccaaactttcccacattttcctgtcttcttctgagccctgaaaactgttccaatctctgcctgttactcagttccaaagttgcttccatatttttgggtatcctttcagcaatgccccactctactgatacctatttaccatattagtctgttttcatgctgctgataaaggcatacctgagactgggcaatttacaaaggaaagaggtttaatggagaaatcacagtcccatgtggctggagaagcctcagtcatggcagaaggtgaaaggcacatctcacatggcggcagacaagagaaaagagcttgtgcaggaaaactcccctttataataaccattagattttgtgagacttactcactatcacaagaacaacacaggaaagacatgctcccatgattcaattacctcccactgggtccctcccacaacacgtgggaattcaagatgagatgtgggtgagggcacagccaaaccaaataatgtacattaatatgttttataaatttatattgtgaataatttaaagaaagaaaaaaataaggctggagaatgaagaagactcttacctaaaacataacaaaataggaaacagtgctcaggaaacagtgagagtttttgagatgctatacctgaaaggcaaaaattggaattttattctcacagataaaataattatgacaattactaagcagcacagaagaacatgtatagcctctgttaaatgaaatagcattttataaaatcgtatatacactattttagcaaccacttaaaattatgcatatctatgaaccattatgggaaaaaagattttttgaaatttgattaattaggaaggataaatcaggacagtatttgttttcctttcttttcattttcattgcccttgttagtgaagtggtcataaacttaacccagtttcaaccgggagctgaaacaagggtgtgacaaggactgaaacagggatggatgcatggaattgaggaagcgggcagaatcaatatgcaaaaggcagggcatccattcagggctgcagaggggaggtcaaggagggatgatgaaagaacatcaagctgtgtggccatggcaaaatgatttctgattccgtggaggtatataagcaagatagcagcaagacagtttagatatttacattagtttgaaactaagtaacattaagtatacttttctctgaaaaaatttccataagatctgtattatttcttttttaaaatttggaagaattcacttgtgaaacggtgtggatctggggtgtttttttatagatgggtttctaaaaatgaatacaatttttttaaaagataaaacactcctcaatttgttaatttcttcttgtttcagcttttaaacattaacatttctcaataaatctgcccatttcatctaaattgtcaaacatatgggtaaaagttgtttataatagctgcttgtcttttaaatgtctgtagtcacatctttctttgttgttttgacattggatttgtttactctcttctttacttttggccactattcctaggaatttatcaattttattaatctactaaagagccaacttttggctttgttcattttcttagattgtatttttaaaaacttccatttcctcagcatcttccctcacatagccatgctatctgtctttgctagattgtggcaagcaggaaggggaaaaaatgcttcaggtgaagaaccaggagataaaggtcacaattcagggaaagtcaccatcccccaccctttccctcaacacaaaccctctttccctggagtacaggcaacagaacaattacattttagatatatctatattagaaagatatgatctacttaacaatgagcctggttaaattatgaaacttatactgtttctcagattttcccctttttttgctgctaaagatttagatcaatgttgccaaagttttcttttcttttttttctaaaatatacagagtcttccattgtttaccaggctggtcttgaacttctggggtcaagcaatcatccagccttgggatcccaaaatgttcagattacgggagtgaatcaccatgcctggcctccaaacattttaaaactttcctttttgcaaaggagagtgtgtggaagacagaggcaatcaaagcagctcctcacgggttccagtggtctttgaagtttcattggagagtttcattactgaggtggtcaagagtatgggcccttagcttgatctaccacttacaaagtgtgtgggcctggagggcagtgcatacttacatttcagaattgaagacgaggataatattactgggtcaaaattcttcagttttagtccagaccatttgggtgttccagagaccaactatctccccttttcagagacaatgctgtcattcttttacatgaggcttactcttggcacaggctaagacatttaaattggttcagggctctcagatcccttatttataatcccaatctgatctcctgatgtgtgggtgaccaggcatcatttcaagtctgatttgaaaatgtcgcctgtttcaaagatcacaaaacagttgggatattgctacttaataaatcctttattttgcatggaatatttgatccataaaatcccatttacaaatacctttaaggcaacatttctccaagctggtattaagaagcaagaacactgtgagatgtttcagtgaaaaacacacacacacacacacgcacaaacacacacaacaacaacaacaaaataattatttcacagtcagatatgtttcttttttttttaagcccaatctttttttctataagttattggggaacagctggtgtttggttacatgagacagttctttagtggtgatttgtgagattttggtgcacctatcagccgaggagtatacactgcaccctatttgtagtcttttatcccttgcccgcctcccatccttttccccaagtcctcaaagtccattgtatcattcttacgcctttgtgtcctcatagcttagctcccacgtatgagtgagaacatatgatgtttggttttccattcctgagttacttcacttagaataatagtctccaatctcacacaggtcactgcaaatgtcgttaattcattcctttttatggctgagtagatcccatcatatatatatatatatatatatatatatatatatatatatatatatatatatatgtaccacggtttctttattcactcattgattgatgggcacttggattggttccacgattttgcaattgcaaattgactgaccttcaacaaagcaaacaaaaacataaagtggggaaagggcacccttttcaaaaaatggtgctgggataattggctagccacatgcaagagaatgaaactggatcctcatctctcaccttatgcaaaaatcaactcaagatgaattaaggacttaaatctaagactggaaactataaaaattctggaagataactttggaaaaacccttctagacattggcttaggcaaggatttcatgaccaaggacccaaaagcaaatgcaacaaaaacaaagataaatagttgggacttaattaaactaaagagcttttgcacagcaaaaggaacagtcagcagagtaaacagacaaaccacaaagtgggagaaaatcttcacactatacatctgacaaaggagcaatatccagaatctacaacgaactcaaacgtatcagtaacaacaacaaaaaaacaaacaatcccaacaaaaagtgggctaaggacacagtcagatatgtttctgaaacattgagttctcagcatccaccttagagagcctcattgaactttagtttatttatctctgaagaattgtacagaaaaactaacaatatggtatctgagtctgggttctcctagtgcagacccagaaataaggttgtacttgtaagtagttatttgggaagtgatgctgggaagcactgctagggagaagggaagtaagacagaggggccagcagccagtagaacacatatggttaaacaggttactgctgaggaattcagtccggccagggacttctgagagatggtggagaccacatcacagtggtgagaaaggcagagtggtaacctgccctccaatccatcatccactgagggaggctcctgcagcattcaccccaggctgctccagcctgacttgggcacactgagagaaagccctcaggcagtgggttttagggctctgcaatgggaggcggccagcatgtaatggacagataggtgctttggggatgtgggtggacactctcaactctgctacattcaggatttctcaagtttgactacacaatgtccttttcctgtctctcccctgtggatattccctcaccttttgataagagctatcaacattccatggacccaatgttttgttccatgtccttgggatcactatagttttaggttatgctttttcttacccagatcaacatcataaccaggaaatgaggggtccataagatttgcttttataaaagaatgtctaacccaaaagtagaaacatcttttttttttttaacttttatttgagttttagagctacaggtgcaggtttggtatataaattgtttgttgtgggggtttgctgtacatattcttttgttactcaggtaataagcacagtgctggatacatggtttttagatcctcacccttctctccaactcccaagtaggcctcagtgtctattattcctttctttgagtccatgtgtattcaatgtttagttcccacttataagtgagcacatgtggtgtttggttttctgttcctgaattagttcatttaggataatggcctccagctccatccatgttgctgcaaaggacgctattttcttctgtttttatggcagcttactgttccatggtgtatatgtgccacatttttttaaaccaggctagcactgatgggactctaggttgattccacatcttttctattgggaatagtgttgtgacgaacatacgcatgcatgtgtctttatggtagaacgatttatgttcctttgggtggatacccagtaatgagacggctaggtagagtgatagtttggttttgcgttctttgagaaatcaacaaactgcttcccacagtggctgaactaattttcattcccaccaatagtgcataaacattctcttttctccacaacctcaccagcatcttttatttaaaaaatttttaacaatagccattctaactgatgtgagatgctatctcactgtggttttgacttgcatttctctaataattagtggtgttgagcatgttttcatatgcttgttggctatatgtatgtcttcttttagaaagaagaaacctgtctgctcacgtcctttgcccactttttaatggtgttgtttctttttttgtttgttaatttgtttaagttctttatagatgctggatattagacctttgtcagatgcatagtttgcaaatgctttctcccattctgtgtgttgtctacttacttaatagtttattttgctgtgcagaaactctttagtttaattaggtcacatttgtcaatttttggtttttgttgcaactgcttttggcatctttatcataaagtctttgctagggtctatgtctagaatggtatttccttggttttcttcaagggtttctttttagttttaggttttacatttaagtctttaatctatcttgagttgatttttgtatatggtgtaaggaaggggtcctgtttcaatcttctgcatatggctaaccagttatcccaccaccatttattgaataaggaatcccttcaccattgcttgtttttgttagctttgtcaaagatcagatagttgtaggtgtgcggctttatttctaggctctctattctgtttcattggttgatgtacctatttttgcactagagccatgctcttttggttattatggccttgtagtatagtttgaagtcagataatgtgatgcctctagctttgctctttttgcttatgattgttttagctattcaggctttttttggttccatatggactttaggatagctttttctaattctgtgaagagcatcactggtagtttgataggaatagcattgagtctgaacaatgctttgggcagtatggccattttaacaatacaaaagaacaaacttctacctctgtttgccatctccactgctcagccccacatgcaaatatatcccttgcagaatgtcttatgccactgcctgctccacttactctggtcatgtaatcacctacatccaaactcagtgggtaaaacatggcacctattcaacttacagagcctgtaagttggcttagacagagcacagtggagttgtctggtttctgctctgcaatgtcacggcctcacatggaagatgccaggatgggctggactcatctgttcctccctcacatggctaggaccagcactggggagattcacacagagaggagctggaacactgggggctccctgggcgtgtgtatctgtagatggcctctcagcatggcagcctcaaggtagggaggcttcttccctgaaggctcagggctcccaaggtgggggtctcaagggagagcaggccagctggaaacatcaacttttatgacctaacgtcaggagccatgcatcatcacttctgcacatctatccatcaggatagttacacaggtgtgcccaggtgtagagggaggaaatacaggccccacctctcgtgaagaagtggcgttgcattgaaagggcagtgtgtggaacaaaagaggtaagaaggcagctgttttctgaaaaatgcagcccccaaccctgcctaggaatctcaacaggagatgaatgaggtgcacctctctagagtctggggaaactgctcccacttcccggtccccaagccatgttggactctgcaacacagaaagaacgaccatcctcctcttttttctgcagggcctggacatgccttcttttttgttcccttttcggcacctggcatcatgctgcacacagcaggagtgaaggactatgtttgagtgaatgagtgcattgcctcctgcttcattttagcatctcttgttaggagaaaagggcagaggaaacagcacaaatgccaagcttcgtggaattcagtgggagagccgatgcatcggccttccctcggtgcctgtcacagtgctggggctccacggcctcccttgctctgctcctcgtgacatccatggaacaggcactcgaaccctccccctcctcttacatgtggaggggactcatatccagagattctgactgcgattcccaaagcacacaagcacgaggaggaagggaacccaagtttgcctgatagaagagtccaggctttctttctggagcccattttcctttagaaggaggaagtagacctccaggagctctatttcaaagccctcccctctgatctccttcagatggatggcaccgagccggggaggagctgtttcggctccctccgctcccaagctggcttacaactcctgctctgtgaggctgactcctcccctttctccacatgccgctgtatattggagtcttcaccgctcagttcaacattcaggaacctcacttcattttaatatgttttgctctgacagaaaattcatttccctggagctgaagctgctccccctgccaagagctgaactggctggtgccagtcccggggttctggctgtgccaagttcaaggatgaagggtaggtcccttctcctgccatttaccttcccagattctttcacaagttgggttggaaccaggaactggaagtccaggagggtgttttgtttctctcattgaggttttctagtgagtaccaccccgaaccccacatgcgaacagggacctaaatgactcaccctgcaggggtggagcaggggcctccgcagtcccgagtctaacctccaccagggcaacctgagcctgcagcctgatctccacccctcatggaaacagcctggctgcaaagattttactgcccgagggacacggggaaaaggccacccctctgccgcatatgagtcactggtctataaacagctgctgggcgcctgaatgcccctcacactttgtttgccagcccgaaagcctcatatttccctgcaacgaactgctacttttttaggattgtaggagttttacaagctttaagaagtttatagtgtcagattaagtaagatccagcgctaagaattcgatttcatgttttcaagagaattcatacacgcggctcataaattctggaacaagatccctacagactccagcataactgatctaggagaaactctctatgaaacctttctctttggtgagttatggaaaatatttgctgcctacagcctggggtgatggcaaacattcttgtgcaggcctggtgtcggggtgcacagtgatgtggcacagctgtgaccatgccggttggtctcgagcttgcggcctgtcacagggtgtttacctgagaatgaatctgagaggccacagggctggaactgtgtctcgcgggcggaggaaaatgtgcacagctattttaaagccgagggctgtacatcttgttcacggcctgctgttcacaaggacaaacagggctcacctaaggagagggacagtctttaaacaaacctcgttacacttcaagagtcgctttcaaattggaaagaaagggggacaaaagggtcttacatgcgtctatgatggatgagacacacaggcacagaagcagcggcagactcacattctccttgctgctggggagcctgagagacagcctggtggggatatgcatgtgtacatgctcatacagatcagccttgcacacagatatgcacacatgcacacagacggacacacagccacacatacctttacacgcacagatgcatacaaacctacacacacgcacatgctcacacacaaatacacatgcacacaggcacacatccacacacctatacacgcgtagatacacaaatccacacacatgcacatgctcatgcacagatatacacacagatagacacacatccacacacacccatacacacataaatacacaaatccacacacacgcacatgctcacacacagatatacacacatgcacacagatagacacacactcacaaacatacacacagaggtatatacacatctgcgcacatgcacatgatcacatacaaatatacacacaaattaacacaaacatatatacatgtgcaaacacagagatatacacagtcacacatgcacacacgtgcacacatctagacacatgcagatatgtgtacacattcacacatatagacacacacacaaattcacacacgtccacattcactcagagatatacacatacatttacacatatatacatttccaaacacagatatatatacattcatacatgcacacacatgcacatatatgcacaccgatatgcacacacatatacatacatatacaacatgtgcactcacacagatattcacacaaactcacacacattcatagacatacattcacacacacttgcatacaaatctaaaaacagacaagtataaacgtgttcaatacacggagatgctcaagcatatacacactctcactcatgcacactcacatgcacacacactcatcagcactgcacatgcatgctcacctcagagaccaacacgcactcccacataaactatcacacatgcacatacagtctcacactacctcatacacatccccacacccacatagacgtttgtaagcacatttctttacatacaggccctcacacacgttctcactgatggactcacacactcccttacacactcatacacatacagcttgcactgaaacacacgaatgccgtgtctctggttcttctgaacatttttagaaagtgttgttgtccccagctctgggaacaccctccctttggaggcccgcgtgggcccagttgccctagtgtgcccatccacgcgcgaaggagtttaggtcgaaaggtttctgctactttctccctcctgtgtcctccaaaaggaagacggtgactactatggtggttttgaggccacctggggagctgcagatagattctccttggtgggttgaatcttcatggccaggttcattgactctgagaagttaatgagcaatttgcattttcctgtttgattacctgtattttgtcagctgaagtttattttatgcaaatgggtcacctctctgcacccttccattcttcccaggtgttttcatgtgctgcctacgatgaggtagatgaaagaattttttgagtgggtcactggattttcttctacctcgagttgccttgaaaaacgcaactctagtaaatgtcagtttgactgcaggaggctgtggctcagctgtgtttcgatattgttttggatatagatggcgagtcagggcactttccctgtattatccaaatacttgtgtatttttacacgtttaaattatttaagcatttaaattataattttattaacacataaaggagtaaatttctctttaaaccaactaaatagttttaatattatcataattcctttcagtttcttatacctataaccataagtaagctaaatggagttttataatttatattaaagttcttatctgaatccctgggttctaacccttattcttcagaatgatcagatatccttccatgtaaataaatgttgatgtttttggatcagctggtaaaacagaaaaacaggaagagacaggcctgcacaagaagcatcatcttttttgttgtatgttaaaatacataataaaatttactatcgtaacaattttaaatgtacagttcagtgacatcaagtacgttcacattgttatgcaaccagcaccaccattcatttctagaactttttcatctcgcaaaaccaaaactctgtaaccattagacaacaactcctcacttcccctcccactatgtctagcacccacccttctactctctgtctctatgaatttgactactctaggtatacctcaagtaagttggatcatacagtatttgttcttttgtgactggcttacatcacttagtctaatgttctcaatgttcatccgtattgtaacatgtgagaacttccctcctttttgaggctgtataatattccattgtgtggagataactacatttgcatatccattcatccattgattgataaacacttgagttgctttcatcttttgggtattgtgagtaatccttctgtgaacattggtgttaacagactgttttttgtttttttttttaaagacctgacactgtagatttctttttctaaaaaattattattttctttagagactgatgaaggttggagctgacacatgggttttcaagaagctctcccctccccatgattctaatgggcagccaatattgtcatccactaggtgagaggaaacccagatctcctttgggagcaatgtcccctacacctgtgaagagaggtggggaagggtccttgccatagttcataagtctggttttctctttacatctatgagctcaatttttagtttccacatttaagtgagaacatgcagtatgtgtctgtctatgcctggcttacttcacttagcataatgttctccaggatcctttatgttgctgcaaaagacaggatttcattctttttatggctgaatagtattccactgtgtacatataccacattttctttatccattcgtctgtggatggatatttaatatttaggttgattccatatcttagctattgtgaatagtgcttctgttatttttaaaaagaaatagacaacagctagatcataaaacttcatttagcctaaatgcattagccccgattcccaggggcaagcatgtcagttcctccttagttgctccagggcctttttttaagcaccggcattatgggtccatctgtgatcagtagagtgtgtggtaatatcccaactcagagcccacaaattcagaccaggagtgctctgttcccctggccgatgcttcccttttttgtcctccccacaggagtagtatggacggcccacaagtgtggaggccagttctggagtttatacccatccactgggatgagaaatgagggcttggagctgtaactaaaaaaatttttttctcacccctgtctgaagctttacttttcatatctggacactggcagctaaatgacaattagaaaacaaatggaaaccaattccaacaagaaaagaccacctgagggatacttagagtctttcttggttgagttttctcaggactcattggcttagaaccatatctggaaatggttgcagagacgagaagggatgtgtggcgataagagggtgtattggaaaggggagttgggtgacatcttccagaactttccagcttgctttctttaaaaccactcaaggactaaccacagcaagtatacaacggcagtaatagatgattatattttgttgatttctaccattgccttgtactgtgctttattttcattatcaagtttactgtgtggatgaataaagcaagacaagcaattgtgtctctatttaccagtgaggaaaatgaggctcagaagggctaactcactcgcccaaggcaacacattagaaaccgacctgagaaggtgcacatgagactttgcttttctttctccctccggaaatgcctccctccttgtttacttattgtttacttacctgtcctcctcgggggctgtctggggtgatgacaatcacaggctctggggtgggccagatgctgggtaatttatcagccctgcaaccctgggagacggatgtaaccactgtaaaatgggactataggatcatgaatgtgagatcgtaaacataaaggactcagaagacggagaatgttcaataaatcagtgtttttagaattatggctcacatctaattaatgggatgcaggctgaattttttttttaggtggacttgacctccacccttcaacctctggctcaaactctcttatgcttatctcagtttaaatgatcttccactgcctcctctgaaattccccgaaccctctaagtgggatctcacagtgtattattctattctccaaatgcttcaataaaagtaaattcttgaattcagtttattacctggtttaataatttttggaacgttgtgctgggttcacagtgagttccataaggacattctggccattgatccatctaaacactagctgtgtctttgctggaattgggagaaactctgtaggtgtttcttgggacttgggcaccatgcttggtattttacacaaccaaacctgaaattgcagagtctccccagcaacaatgagtgagaaatccaccagatgcacatatccccactgagagcaagactatttacttcgttacattttatacccaggaacaacttggttaatataaatgataggatacagcaaagcaatttcccagtctgtggggcagagaagatccctggggagaagtagaatgattctggagagcctggaaatcaggctaccatgtatggcctgtgggctgagcaaacactaagctttctgccctaggtgtatttcatcaaatttaggatactattgattgtaaagcccaccattatttatgtactactagaaaataaatactgacattataccgttggcacaatgactaaggtatcatcaattttcaacaacacaccaagactacaaatgttaaagtataaaatgagaaaatgtgttaaaattgatcaaataggttatgcactatttttgaagtgagactaggcattctgttaaagtaaatttgtaaaattcagatgtatttgaaaatgttacagaattcataatagcattttccctttcttcaaggattgctaaaaatacaactattaagtgttttgaccttaaaaagagccttgattctcaataattttgaaaccattagtgaggatttctttctctctgccttctctctgggggttcttgtgaaaaatcattgactctccagggaacaaatcaaattctaaagagggtcccagagaagctgctaattggaaacaatcaacaaacgattggctctattaagaagtgtgctatgtcagcccttagcttgttacactcctaagtgaatataatttccagaaaaatcccagaatgcaacaaaatatcttaagaaatgttacacttggggaagtaaagaacacaggacttaagttgtcaaaaattaaaatctttccctaagcacagctctatcaggttttttcagagtatattctcagatccattatcagattttaatctcacaagtctgaccagaaaattcatgggagacctctatgactattcacatgtgggacggacattcagaaaatgcgttgcaaagagcatggaggcaaaggccaccaagaagtcgctggaatcaatggcagcctttgcaaaaacgttccaaattcttaacaaccatgacttatattttcacaacttagtttttaaggaccagatgactgagtctcaaatattgaaatttccagtaaacaatgaaaagtctaagtgttcagtgggttcaaaggaacacaccagtaacaaatatttagaaaaattaatgtcagataatttgatgggattttatagaagtgttggttctcacagatttagtaatgtttaagatgatggcccatgagttcgctttctggttccttgaataaaatgcccgacagtgcattgtcctatcttatctctgtgtttaggccactgccgtgcagaagcatcctttctttcataggcaggcaggcagcgtccacaggtgtgaatccagaagtcaatggcatctgcaccttcagaatatctacctgactttccctacaagactgaggtttcagaacccacaccaactctgtgggtcttattaccagattcacccccagtgtctgctctggaccaaaagggcaaaaatcaaggcatctggataagtggctgctagtcctgtccttccactgacaattaattgaatctgtctgtacaggtccctggacctcatctgaaaaggtggttgcggaaagtgagaggagccgatgcttctctctctgctttcttttcaggcctaagcctctgttctcattttagtttctctggagaatttaatggactttatagacacaatacaccctattccatcctacaacccagaatcattagaaataagactcgcagccaggcttggtggctcacacctataattgcagcacttagggaggccgaggcgggtggatcacctgaggtcaggagttcgagaccagcctggccaacatggtgaaactctgtctctactaaaaatataaaaattagcagggcgtggttgtgcacacctgtagtcccagctactcgggagggtaaggcagagaattgcttgaacccggaaggcggaggtcgcagtgagcagagatcgtgccaatgcactctagcctgggcgacagagtgagaatctgtctcaaaaaaaagaaaacaaataaataagtaaaaagactcggtggccaggcacagtggttcatgcctataatcccagcactttgggaggccaaggtgagtggatcactggagggcaggagtttgagaaataaggctcactggatttcaagaggcattcggtgacatcagattttcccaaatttgccagaaagataattttacctgattaaaaaaacttgccagaaagacataagacatgtggtaaaaactctttatagttttctttgaactgaaattcttttttttttttttttgagacagagatttgcttttgtcgcctaggctgtaatacagtggcacgatctcagctcactgtaaactctgcctcctgggttcaagcaattctcctgcctaagcctcccaagtagctgagattacaggcccccgccaccatgcctggctaatttttgtattttcagtagagatgggttttcgccatgtcagcctggctagtctcaaactcctgacctcaaatgatccacctgcctcagcctcccaaagtgctgggattacaggcgtgagccaccacgcccggcctgaacagaaattcttgaagccagagagttattaaagctagacagaaatacacttttgcatcccttttgctaaaagccaccaggcctggcaaagctatgactctattcagccacagcattcagaggctgggccgcagcattcagggggagcagttcctgctgaaacaactggcatgcccagactctaagagaaggccaaatactagtatcaatcaacgggtgcttcctgagtgcctgctacagatatcacacatgctacacgcctggtcctgacaactagtcctaactaactaacagccaagcattttggcccattagagaatctgtaagaagggcaccatggctgcctaggactcaaatgagagagaccaaagccccagaagctagaaccaattgagaaaaagtttccgagaatttgctaacatttcacttgcccttattattgtggaagctgaaatttaggtctttattaaaaaaatcatattaatttatttgattagaaaatggttattggggtactggtgtatatgagtcagtgtggaaagcaaaatcaatgctggccttgctttttagaagtgcaggtgtttgagatgctgtctgagaagaacatgttatgatacagatgttgcacatctggaatgtggagctcatttcatttatttatttatttttctttttttgtttttttttgtgtaaatttatggagtacatgagaatttttttacaaggtatgtaatgcatagtgatcaagtcagggtatttagggtctctctctctctctctctctctatatatatatatatatatatatattttttttttttttttgaagctgagtatctttgtcacccaggctggagtgcaatggcgcgatctccgctcactgcaatctctgcctcctgggttcaagcaattctccttcctcagtctcctgagtagctgggactataggcatgcatcaccatgcccggctaatttttttgtacttttagtagagacgatgtttcaccatgttggtcaggttggtcttgaaatcctgacctcaaatgatctgcctgcctcggcctcccaaactgttgggattacagatgtgagccaccgtgcctggccacaatatattttctaagtgtagtcatcctactctggtatcagacattgagtgtcttcttcctatcttcctgtatgttcgtaccctttatctctctcctctgcatcctctccttccccgcacttgcccttcccagtctgtcatctgtttttccactctcaacttgcacgcgtttaaattttttagctctcacgtataagtgagaagatgtgacagttgtccttttgtgcctggcttattttcgctttaaagtgagagccgaggtcagcttgtacatggcagctcccaggattgtgatctgaggatctccgcagagcatggctcggaagtacaggcttcttagaccagttagtacaggagcggggccaggagagtgctgtcccctcagctccagtgagtggctgcccatccagagcaagcctgcagcccccacccgcctcctcctttcaccattacgttgtactccctatgaaactcccatgtttactgttggcgacaccctcacattgtgtctgacttctgtcactttcccatctcagtgcataaagtgcagcctgcctgtggtgtttgtgatcttgtcttgttttaagtcatctgggcgagtgtcctttctctagtttcttctctgttgttgacaatttctagattgatttcaaaacaggcaaatcctccctccccatcacctctgattagggaggaacagagccgtgtgcaaaggacctattcccaacaccaggacaccccaagctgctgcattcctgctgcactccaacaggcagcatgtccatctccttggaaaagaaagacatgattttctaggggaacagctcctagcatatgaactgcctctggctttggtgttgggagcagacctctaatttgtaccttttacgaggaatcagcaggctacaacagcagatttcctaccaacagcagctttattcccctgtggccaggccgggtcccttagtgttgccttgctgagctttggccatcctcaggcagccctgcagcacagcccagaagcactgaggtccccagagtatcacctcatcagctccctggggtctcagacaaacacagccttcctagtcaaggaaataatgtcccccttgtgatgcaaagccccctggagggactgagaggagcttcctggcttcactttgagcgcagctgtcctcagttcctcctgtgaagcagtgggtaatgggtggcctggctgggctcaggtgggcaaacagtccttctgaagggagagacaccaggctggggatgtgtattcagcccctcaggaagtgtccaggttccatgctgctcggtgtgccatggagatgcagatttcctctcagctgcccgatttcaaagccagacctggctggagacttttcagagcgtcacacctgggacctactccttccagaaaaaaaggacttccactgacttttcagggaggttggctgaactctgaactctgagtctcttcaagagacttcaagaaggggagtgtctaacggctttttcgactgcattaaagcagtgactggttctcttaacattcaaggtgccttccctaatttccttagtgagcaatttaagatacatttgaagattcctgcttttgccttttctccccttcaccagacacacttcttaagaacaaaatgtaaactcttctacattgtgccattttgattttcaagaacctgctatagctccctattatccgagaatgaaatgaacctgatctcctcagggacacctatgtagcctgccggttacatgtatgtcacatcttcaggaaagtctccccaatgtctgggcctaggcaaagtcagtgtcttcctgcactgcttgtatgtgtgcagtccatgagaggagacccaggtctggtttgcctgctgctggctcctgatgcctaactcagtgctgtgcacagcaggcttatcaaacttgaattacacattttttaaaggagtctcaggagaaatctttgtgctgccaggctaacacacaacatatccttacgtccctgatcactgatttctgctccaaaatacccacaaattatccactctttgaagcccagcttgtcatattttctccatgcacttttctaatgactgtagctcatgatattattttcattttcacacaccttttcacaggctaccatgtggtataaattagcatctaagcatctttctcagtttgttttctgctatgttgatggaatatcatggactgggtaatttataaaaagtagaagtttatttggttcataattctggagaccgggaagtccaagagcatagtgctggcacctggtgagggtcgtcccatggtggaaggcttcacgtggcaattgagaacacaagataaagagaaaaaatggaggccaaactttttttttaagatgaggtctcactctattgcccagtctggagtgcagtagcaccatcacaagtcactgcagcctcaaactcctggtctcaagaaatcctcctgcctctacctcccaaagtgctgggatcacaggcatgagacaccatgctcagtcgaacttatccttttagcaggagcccactctcacaacaactaacctactcccccaagctaatgacattaattcgttaatgaaggcagaaccctcatgaggtaatcacctcttaagggttcccgtttttaatacctttgcaatggcaattacgtttcaacatgagtttcggatattcagccatagtattccatccctggccccccaaaactcatggctttcttacatacaaaatacattcgtttcatcccaatagcccctaaagtcctaagtgttccatcattgactcaaaagtccaaactccaaagcctcatccacatcagcaatgtgtgaggctcaaggcatggttagtctttgggcaaatttccctccaactatgagcctgtaaaattaaaacaagttatctgcttctaaaatacaataatgggacaggcataggttagacgctctcatttcaagagggagaaatggcaagaagaaaggagcaactggtctcaagtaaatttaaaacccaacagtgaaaacaactttaagtgttaaagtttgagaaaaatctcctatgattccacgacctacattctgtgtacactggggtgagggttaggtccccaagaccttgggcagcctgacctctatggctttgctgggtgggaatctcatgcctgcagcatttctaagctagagttgtatgctggtggccctatgcttctggggtttttcaggtagccccacttccgtggctccacttggcattaccctagtggatggctctgcctctgcagcaggtctctgcctgggtccccaagcagcccatggcattctttaaaatgtaggtggaggaagctgtggttccatagctcctgcgttctatgagcctgcagaattaacgccacatggatgctgccagagtttactactggtatcttttggagcatctagtcgagtcacacctgggaccacttgaaacatggcttgagatgtcaaggagtgctgtgctggaatgtgaggagcagagtctccaggtgaccatgggcagtgaggcccagaaaggtgccccaggttcatctcctgaaaccactctgcctgcctagagctctgggcctgtgatgggagggcgagcctcaaagatgtctgaaatgcctttggggtctttctcctattgtgttgatgaatagcacttccctccattctatccatgataatctctttagcaaacaatcattgaccacaccctcggtttgttctcctgaagatacctttacactatttacatggctgaaaattttctatatttctcattttacttgccttttaattataaattctgtttttaaataagttttcttcacttccctcttacaatatgcagttaaaagtagccacacagctgcttgaatgctttacttcttagattttttttttttttttttttttttttttttgccagatatcctagtttagtactctttaagttttgcattgcacaaaaccctcgggccagtatacaattcagccagggcttttgctactttgcaacaaggattttcttttacttcagtttccaatactttgttcctcagttccatctgagtcctcatcagaatggcctttaccttccatattttgaccaatgttctggtcacaaacacgtaagtaatctctaagaagttccagactcccccctacagctatcctgttcttctgagccttcattagaattgccattaacatggccgggtacggtggctcacgcctgtaatcccagcactttgggaggctgaggtgggcagatcacgaggtcaggagatcaagaccatcctggataatatggtgaaaccccgtctctactaaaaatacaaaaaattagctgggcatggtggcaggcgcctgtagtcccagctactcaggaggctgaggcaggagaatggcatgaccctgggaggcggagcttgcagtgagctgagattgtgccactgcactccagcctgggggaaaagaattgctcttaacatgttatttgcagtaatctaggcttttcctaaccagctacttcaaaatctgttctgtccatacctttcacaggtattttcagcctctgtccattactcagtttcaaagctgcttccacattttcaggtatttgttatagcaaaaaccccacttcttcataccatttgatttcttcatctattttctgctactataacagaataccacagactaacttacaaaaaacaggagtttatttggctcatggttctggaggctggaaagtccaagagcatggcatcagcatctggtcagggtcttgccactgcagaaggctgtgcatggcaaggaagtgtgcaagacagagagaaaatgggggccaaatgtatcctcttatcaggagcccactcctacgataactaactcactcccataataacagtattaatcaccttttaaaggtcccacttcttaatatggtcacaatggcaataaaatctcaatgtgagttttggaagggacattcaaacaatagcaggatctgttctatctctaaactctttgtactgtcttatgttctggaaaaatatgttagaaaaatgtataaatatgcacttatctatgacagagaaacatacttagaaatcaatgctgcattatttacaaatctttcagtgaatatgtcaaatgtgttcaatttaactataagctcccaatggggagacattatggtgtatttttcttttataacttgtagatcttagcattgtcccaggagtataatatattataaactagtgtttttgaatgaatttgtttattggttttacatggggaatgactttggcatgcaatcacacctcctaccaaaactctgtattagctggatgtcactgaatccccaagtctggatgtgacatgatccatgtgatgctcttattatggggggaaatcatttattggtgacaatctgtggaaggctgaccacatttttagcctcccttgcagttagatgtgataatgtgactgagttccaccaattaaatgtgggcacagggatgtacactactttctaggcccgctgcataaaactctctgatgcatcaccctttctgtcttcctctgttgattggattggcactcagtgtggccatagaatttacatgctgaagatgactatgccactgtgtggagtgtactttctgtacccaaccccaccctccaccacctatcttaatggctcattttggactttacatgagtgagaaataaacttcatcacagtgtctagtacttgtcttaataactacattgtggagaaccaaagggcacaagagagaaatcctgccctcctttcccagaaactaatttagaatgttcaaaataaccttttactttacatgaccctgtagaaatccatggcttttgttagggacaggtggacagcatctaggatgtcagaactctatacaggattatatatttataagctcttactcatcatatactccaactttctcattttcaaccttgaggtgaaactcttatgtatatttttgtggaagcatttttaaatgacagaaagtaatttatatatatatgcaaattccttataattatgaaaataatactttcagagaaactttacttcccaattttgtcagctgagtttcaatttctaatcatccccacctcaattcatttgaactagctgactcttccattccctttgactcaaattctctgcaggaactgaaggagaaatcagagagaggatctgagtctgagagtgagtttatattaatgcctatggtctttgaagccctagcaaaatgttcctccatagatcctacagttgatttcaaagcttatgatctgttggctttttttcaagattcgatgttgcaggtttgtttttagctggtgcttggggacctaaaccagcctctaaaggaattaaattactaactgatccttgaagcatagcagaaactttggacaagattgtcaatcaacaaacatgtcctctgctccttaaatgagtgaggcagaatctgagtcctgaaggagcttcagaagatgtcagtcaaagtggttctgtgctcaaggaggctacaattaagttggaatatataaaggagttgtgaaggtgtcatatcaggcagtttttgctggataagagaccaattcaaatataaagatttaaagtaagaaaaattacttatctgtcaggttccttggttcctggacagcttttctgctctggatcagctcagctgaaactgggttatcttagacagtctcactcacatgcctggtggttagcttgatgttatctgagcaatagtcatgtgactcttttccttcagcaggacaacccagtctcattttctcggaggcagaggtatcctgagcaacaaaagaggccaagatccaatgaacaagcacttttcaaatcttcactgtgccatattttctaatgtctccttagccaaaatatttgtccaatctggatttaagaggcatcaaatggactccatctcttgatggaatttgagtcagattgcaaacaggtgtgaatatatgcttgggaggagctttggggccacttttgcaaaccatttatcagatgtgccagggtctcaaggaagagctagggagtcaaggcaggtcagcaaggaacatgagcactgctttgaatggtggtgagatttcaacaaagaaggatgggttgaagtgaaaggcagcccaagcagaggcagcgtgagaggaatgctctggagaagagaaaactttgagcctggtaaaggaataactacagtgtcattagagtgaaaggatggtatcaagaacccagagaagcaaagcagaaagatgggaaaatagaaaataaactacctcaatgaaatttcaacatcagcataggcatgtacaacaaatgccatgtgtcaatctgcattctgtttgatatataaagtgtgtaaaaaaagattttttccaggatgcatacaacctaacaaggttgaactatgaagaaatagattgatagactaaatagactgataataacaaaagggactgaatcgatagtaaaacatcttccatcaaggaaaagcccaggacctgatggcttcactgttgaattccaccaaacatttaaagaagaattaatatcaacttttaaaaactaggccaaaaacttgaacaaaaggaaattatttcaaaccgattttgtaaggcaagcattatcctgatagcaaaacaagacaaggatacaacaacaacaaaataaattatgagccaatacccctgaggaaaatagatgtaaaaatcctcaacaaaatactagaaaaccaaattcaatagtgtgacacaaagatcattcagcaggatcaagtgggattcatcctaggaatgcaaggatagttcaacatactcagatcaataaacataatatatcacattaacagaatgaaggataaaaaccctatgattatttcaataaatgcagaaaaagcatttgacaaaaatcaacatccccttcatgataaaaaacaaaaagaaattaggtgcagaaggaatgtacctcaacacaataaaggctttgctatatatgaaaaacgcacagctaacattattctggaaggcaaaatgttgaaagctgtttctctgagatcaggaacaagacaaggatgcccaccttttccacttttattcaacaaagtactgaaagtactagacagagcaaataggcaagagaaataaatagaaagtatccaagttaaaaagaataaagttaaattgttcctgcttattgatgacatgagataatagatagaaaatcctaagcacctcactaaatagctgttagaactagtaaaccaattcagtaaagttgcagattccaaaaatcaatgtacaaaagttagtagcatttctgtatgctaataataaactacctgaaaaagaaatatagaaaacaattccatttacaatagctacaaaaacacctaggaataaatttaagaaagaggtgaaatgtctctgcaataaaaactattaaacgttggtgaaacaaatttaagaagacataaataaatgaaaaggaggttccatgttcatggattagaagaattaatattgttgaaatgtctatactactaaacatatttatagatttaatgccatctgtatcaaagtatcaatgatattcttcacagaaatacaaaaaacaattataaaattaatatgaaatcacaaaagacccccaatagccaaagcaatcttaagcaaaaagaacaaaactgtaaggcatcacactacctaacttcaaagtacactataaagctgtaataaccaaatcagcatggtactggcacaaaatcagacagatggactaatggaacacaaaagagaacacagcaataaatctatacacttacagccaactaattttagacaaagatgcccaagaacacacaatgggaaaaggacagtctgttcaataaatagtgttggtaaaactgggtgtccaaagaagaagaatgaaactagatttgtatctgtcatcatatataaaaccaacagaaattaactcaagatggattaaaaacttaaatgtaggctggtgtggtggctcaagcctgtaatcccagcactttgagaggccaaggcaggcagatcatgaggtcaagagatcgagaccatcctggccaacatggtgaaaccccatctttgctaaaaatacaaaaattagctgagtgtggtggtgtgcacttgtagtaccagttactcaagaggctgaggcaggagaatcacttaaacccgggaggcagaggttgcagtgagctgagattgtgccactgcactccagcctggtgacagagcaagactccatctgaaaacaaacaaacaaacaaataaaaacttaaatgtaagacctagaactataacattcctagaagaaagcatagaggaaatactttatgacactgatctgagcaaagattttttgggagaagaccaacacagacaataaaagcaaatgtagacaaatgagatcacatcaaaataaaaagcttctgcacagcaaaggaaacaatcaacagagtgaagatacaacctacagaatgggagaaaatactggcaaactctatatctgacaagaggacaatatctaaactatataagaaactcaaacaactcaatagcaaaaagaaaagaaaacaaattaaaaaacctaaataacccaatttaaagtagagcaaaatacctgaataagcatttctcaaaggaagacatacacatgaccaactggtatatgaaaaaatgctcagcatcactaatcatagggaaaatgtaaattgaaagcacaatcagatatcatctcaccccagttagaatagccactatcaaaaagacagtagatataactgctcgtgaggatgtggagaaagggataacccttttatgttgctggtgggaatgcaaattagcgcagccataatattagtagttctattttcaatttttttttaaggaatctccttatcttttactatataccccaccctcaaagccctggtagatggtggcctccatatttcttcattcactctgcaggcagcggcagagcaagagaagcaaatgccagcctttcaactttctggaagctttcaggaaaaatgtgattccccaaggacagaggcactgggctctatgcttcctgcatactccagcattaactcatgagattatttgtttttttttagaagaggggtttctaagtccactgagtcaggaaccattttgagaatctgatggaacagtggttttccctcctagaaaaatcaatatatgaacggcattttgcatcttattttagggggttttggggcttctgtcataatacatccttagaccaggacaggaatccctggtttagacatcaaattgttaccactcatcaacttcatgtatatgtgatagagtgagtttttccatgctgccattggcaggaggattttccctgcccttttggtttagttttgtttctcaaatacataatacattgacacgatctcagaaatcataatcatataccaggtactctcagagaagtgtcacttcctctaggtcagtgaggtttgacagaagatgtaacggtttccccaaatcaaaatctagaacattccactgctgcagaaagtcccttacatgtgtgcccagctaaccgccttccttgaccctaccagggcaacctctgacttgacttttatcaggctaggttagttttgtccaaattttacataaatagactaccagcttaggttgactgtaatccacatcgatgtattcaattttattcccattgttggatgctaattgtcttcagtcatttgatacctttgcactaaacagggcaaaactcacggacagcggggacctggtttactgcatccaccagcgctgtgggcagagcaggtccctatttgttgacaaatgggcagataagaatgtgtaattgagccaagccttcagggggagcgctgcaggttgcctgtatcctacctagaactgagccgccattctcacctgttcctttcctgtgtacaggaaggattacccaacccagagcagagtgaggaattagcacatacacaaggcttgggtggggggtgctggaaaggaaagcgtgacactatcagggagggaggcaggagggcaagggttgaaaaactaactattggacactatgctcagtatccaggcaatgggatcatttgtgcctcaaacctcagcatcatcaacgatcaggccatgtcttccccatgcaggcatgggcctgccttccccatgcagaccacattactgggagaaatggaaacaagagactcccgacttagctactccaggtgcagcagagggcagggtgggacccagggcttcaccaaataaagtttgtatgacatcctgaagctgaagggtgaggtgcagacaccagcccctatcaattctgcatcacccacagtgcaggtggcctgctcctcatcccactgttgataaaagcttagagaaacttttctctttagagttcagagaaaaggtctccttatcttgacatttatggagtgagttccctaatgaaaactctaggtcactgcttaaataagtacaaacttatagccaactggtttctttatgctgtcaccatcatatcatttcatccagtaaatgttttgctgtgtaccactaaaatataagaagtcatcttaaaaaatataatcatatcgactggataaagaaaatgtggtacaaatacaccatggaataccatgcagccataaaaaaagaacaaaatcatgtcctctgcagcaatttggatgcagctggaggcccttatcctaagtaaattaaggcaggaacagaaagccagtagttctcatttctaagtggaaactaaacattgggtactcatggacataaagaagcaacaatagacactgggcactgctagaggtgaggggtaggcagggggtcaaaattgaaaaagcaactattagataccacgctcaatatccaggaaatgggccgggcgcggtggctcacgcctgtaatcccagcactttgggaggccgaggcgggcggatcacgaggtcaggagatcgagaccatcctggctaacacggtgaaaccccgtctctactaaaaatacaaaaaattagccgggcgtggtggtgggcgcctgtaatcccagctactcgggaggctgaggcaggagaatggcatgaacccaagaggcggagcttgcagtgagccgggatagcgccactgcagtccagcttgggcgaaagagtgagactccgtctcaaaaaaaaaaaaaaaaaaaaaaaaaaaaaaaaaatatccaggaaatgggattatttgtaccccaacctcagcatcacgcaatatacccaggtaacaaatctgcacatgtaccccctgaatgtaaaataaaagttgaaaaaaatacaatcttaatactattactgtatgtaaaataatgagcaacaatttcctcagtatcatcaaatatccagtttatgtttatatttccaattgtctcataaatatcataatctttttttagcggtttctttaaattaggagctaaattacctattgcagtgagttgttttcaatctcctttaactggcaggtgtcctccccaactctctccctttctttctctttgcctcacactccactgccctgacctccttttctccctatctccccgtctccattctttgcaactcatttattcgagaagccaggttgtgtttcctgcaggatgggtaccttcctaaactctgtgcaaggaacaaatgagcaaatgggccccggtcttctgagcctgcttcagctggtgactttctgggcacttccccttttgagggtgagctagagaatagacaagcccaccaaatgaaaatccctagagctctcccgggctgctgctatcaaaccagcagggctgcgtggatgacgccttgtgcttggggtacgatgaggccacccatccctggctttctcagatgtggccgtgtatagacgccactgagccataggtctggtcgggcttttttctttttttttttggagggagtctcactctgtagcccaggctggagtgcagtggcctgatctgggctcactgcatgctccgcctcccgggttcacgccattctcctgcctcagcctcccgagtagctgggactaccggcgcccgccaccatgcccggctaattttttgtatttttagtagagacggggtttcaccgtgttagccaggatggtctcgatctcctgacctcgtgatctgccctccttggcctcccaaagtgctgggatcacacgcgtgagccaccgcgcccggcgggtctggccatgcttcttagagttatgtggtcaggaagaaagggagagaacctgtttatttgacatttttatacaccacttcatttgataactcaacaatgttacataagaaataaacaacataaaacaaaacataggcgtattgtcacacatgtgaagtaactaaagattctgtctcccttttgctgactctccagacagctgcagaggcttgcacctcctacctccctcctctcctgatttctatttgtgagtcatgggaaataacttacaccgaagataaccagacattctgtccagggagtactcacacaagggcgcagtttgatccaccttgtcctgaaagcttttatgccagatttaggtgaatttgaagtaagcaccaggccaggagacttggactagccctagggaatgaacaatcttcttacagatttgagggcaggttagaataaatctgcccagagacagaaacagaagccacatgtgggaggaaatatcgatggtcaacactgacagggaagaggggtctacggttcagttctcaagacatgcaaatgaaagtacgtggaggcatttcatggtaaataaagttctaggggtaggatggcagggtcatttatgcatggttgtgctatttcataacagaacacaagatggtacaccatctgaatgtaagcaaattataaaacatggcaagtaaattgtagcattttggctttaaaatactattcagctattttatataatttcaaaagaacactttaacaagggaaaggtgatttcaaaatagcattagaaggcagaactaatgtttatatgtacaaaatgtcacatacgacatataagcatgtatacataaagctggtataaaactagaagtcaaaacttgtctgtcgggccaatgagcaaatactttctatatttaggctgacagtgaggaagtaaaacaacatttgttgaaccccttctttgtgtcagacaattttccagtgatgccatttaatccctgcaaacctatgagtaggattttacagtatttgctttcatcctacagtggttatatattcttaataataatcacgataatcattatcatgggttgaattatgtgctccccaaattcctatgttgatgtcctagcccctagtacttcagaatgctaccttatgtggcaatgggttatttgcagatgtagttagttaagatgaggccctatcagagtaatagtagtcatgtaatgccactatgtccttataaacaggggaggctgggacgcagacacacacacacagggagagagccatgtgaacatgagggcagagactgggtgatgtgtctgcaaagccagcaatggaaaggttgcctgcaaaccacccggagctgcagagaggcgtggaacagtcttcctcacagtcctcggaaggaaccagccctgcccacaccttgatctcagacttccagcatcggcacggtcagggtctgttgttttcgcccccagggtgtggtactttgttgcagcagccccaggaagtgaatgcaataatgatcgcagaatggcagtgagcgtttactgaggcacctgctgttctaagtgcattaaaggcacacggtgcaggtcatcctcatggagagcctgggcagaggccctctcacccagtctagggatgtggaactcaggtctggggtgaattcacttcccctccaacgtgcagctcattggtggtagagctacgatttgaacgtggcttcagaaacttataggaacgtaaatgttcttcagaggcttggaaggtgatgagcttatccagtgagatatgggtttagaagcatcccctgctgctggtcctgtgctcctccctggctgggtttctcagaaagggctgacccatgaaaactgagggctgcccatgtggagctggggttttggttctgatccattaagcccagggctttactgggtcccaacactacccacaatccccgtccccttgattttaatgaaactcttaggccgatccaccccgaggagagtgggccaccacagacaggcagagtctgagtagggcagtcagtggagacaggtttgtctgcagtgacgctgtcaaggctcctttggattcttctgactgccggcgtcgcctccccaggcatcaccgagccttttcttgctacactcggctctgtgactctgcttcagaggatagcccttaggctgctggagctgctgacaatatagggacaaagtgcagatcattggtttagtgtctgttacttttgtttagccacagtcccatgtctagacaatgtccaggacagtggatttgtcagagaaggagagagggtccgggctgccacctcactgccccttggtgtatttatcaatgctaaaatcgggagcatttccctgtccctctggacagggaaaggaagggagaccaccaaccgaccagcctctccgggcctgatgggaggaaggtgtagggagctgtggtgccaagtggccggccctgttctgtgtggcccgcataagaaggagctgcagtcctatcacctctcctaaacttcttcttgctcacctcaacctccttaaagcctccaggggctaccactgtaaaatgggtaaagcctgggctccttagctttatcctcagggaactccgtaatctccatgccttttaatccttagttcccactgttctgttttccataccctgttttcccactgtttccagtttccaccctacatagcccctccatcaggcttttgcttattcaacagcctctggtattgaaattatcaggaataatgtatcagttagctatagctgcataacaaaacatcctcatatcaattgcataatccagcagtcatttgctgttgctcatgtgcctgtgtgttctctgggttcagctggtcagggctgggctttgccaggcagttttgctccaggctgccttggcccaggtagttttgctctcagtgctagtctgtgggtgggcaaggagggctcgactccaccatgcttgttttgagccaaggctgcagcacagtagtgacccagggggacttctcctcatgtcattggcagaaaaataagagggaacgtggaaacacacaaggcttcttgattcctaggctcaaaaccggaaaacaatcccttcttctagaggctattggtgaaacaaagttgaatgctccagcccaaagtaaaggggcaagaaaatagctcacacccaccttaccttggagagggtgtggatgcaggagagatgaagatttacggcaaataatgcctcctaccacaagaggtgacaatagcaaatagcacagtagtagcagagacaatcacacgtgctgtaaagtacttaccatgtgttagccccaaattataggattatcagcagtgttgattctcactgttgccctgtaggagaccacccgaggcttctaatggttcctaacatcccctaagaccgcacagtttttaatgacagaatcttgaactgagctgaagatttgtctttgtggatctgagcccagaatttggaagctgcagtttgactccaaagtccaattcatgtcaaaatcttacctctccttcaaagtctccctcaaatgttggcttcctcatgagccatttctcaatttagtacaggttgaatttgcagatctaaaaatttgatctctgaaatgctccttattgaaggccaacatgatgcctaaagaaagtgctcactggatttgggattttggagtttggattttgggattcgcaacacacaaccagtaagtatattccaaaatgtgaaatctgaaacacttctggtgccaagtatttcagataagggatactctgtctgaattatactatgcctgcacactcgattagtgagattgtggatataaatctttgctgtattctgccactgttggatattttaatggagtttggtctaatagaacttcacaacaggcatgtgtaataaacccagctctacacacacaaacacagtactgaaagaccaagagggattccattgcttttcacatctgatgttatttgttaaacgaagaagtccttttcttgagaacagaacatgttaatgatttgtattgtcccaagcttggaagtaaaaaccttggaattgctaagcatgaatgtgcttatctagggtcactgagcaaccatcagaagccccaaacagtgttgacattcggcaaaggctgggtatcccagactcggtcacctgaaatggaaaatactttctcaccagcaaaagtatagataccttttggttaaacgagattgaagtcacacctttgtgagaggaatagcacagccaaaatttagggggcccacctggtgattctgaacattttatttggacaagttgcatactttttaaacgcaggctcttgaaaaattcctttagaaatgtcaaggtgactggtgtattaaaaaagtgagccagagcaaacaaaggtgacattcttttaattctttccctgctgggtcattttctccttgctgtcatctctgcgtacggccatcgtccataatggaccctcgacctgctcagaggttcacacttgagggaaattgcaaagtagaggaaattttgacccagaggcctcttcacctcttcccaccaaagctccagcagaggctcaaacttaaagctaggaagtgagagaaccaaatcatgctggcaaattttctctgctacatcttccaaaaacatggtgataaggacaggagtcaccaaaggtgttgttcccggcatctttcatcatccactggggaagaggctcctgctcggggaccctgagctgcctctaattatcggtcacactgccagctctgtctctccccatgacccatgacactgccagctttgcaattttgttttctgaataagaagcttcacatttagcttttagatttgaaatctggtttgggattttttttttttttaatgagcatgcctgtgcatcatatcagtaaagctgatgatatgagtgtattctatcagactgaatcatatgttaatacatttgccactatgtttgacatacagaaataattccatattgttttacccatagaattgcttgcttccatgaccccaaagatgaatacaaacacacaaaaaaaccccaaaagttacagatataagtgaattttgaaaaataatatactttctggacaaattaatacctaatttctacacactaaatattatttcccactcacataacaaagtcagcaaactgtttctttggtaaacaattggctctgtcgatgttataaaatcatttttaggaaaaagactaacatgaaacaatggtagaaaatcagaatgcaaactagtcaacattccttgaactatgaacgtgaagtaaaaattttacaagtggcaacctaagcatttaagaaaaaacagttactgcttaaataagaaacctgttgcatggaaaagccaccttcctctgtacttataggacaaaatgtgttgtactcttggggatcctcaagttcaaatgagaatctcaacaatttccatttccattttcctgaagacttggcacacgctggctagcaaggctgcccaacagcagagctgcgcagctgcaaaggcctttacgtctttgtcaccaagttggccaggagctgcctatgtgggaagtcttataatgcatcaacaagagggaagcagcaagaactgaatctcactggctcatcaattcccaagtggctggcagcagctaagatactaccctttttctgagccaatagctttctcaggctgtatatgtgccaccttgcaactggcctcttgcaacacagagaatatgaaagaaaatttttatcattctctggtagtcttttgctttctggagtactctgttctgtaatgcacaattagaagtgatttctccatcaacataatgaaactgtagttaaaatgagttcactattttcaggaaaattactgaaaatgatgatgatgatgtcaccaaagctggtccatcaggaaagcatgcagccaagacatctttctactattcaacatggacaatttagtttcacccaaaacgccatctatcatgttaaactaatgctgataatttgaatttgttggttttatagggtttaataagtgtgcaaagttgtatgttgctcttggttaagagctacattcactaggtgattcttcctggagttgtacaggtttatgagatatgttgataattccctgatgtctttttccttacaagcagttgatactttctcaggtttggtgaggacccatgtagaattacaagagagaatccacctgtggctacccactgctgagtcttaacactgcaattggctggattggggcaattcatacaacttgtcacagaagcagaaccaggattcttccctagcagtaaatagacagggaccgtgtggggcaccagaagcagctatgcaggcactctagacagaccttcccatctctgcacagggcaaagtcggtcccagccagcagctgcctccccgggcatgcaccagcacatgcagtgcaagcttctgcaggttgacttagtgtgatgtgagaaagtatcattcacatgtttcatgtcgtgtactttcagagttgggcagagaaaccgtgtcccctgtgtggactgcctgcaggctctctgggacagacccagaggtaaaaagccagcacattccccgtgtgcctgcctaggctctgtttcccagacactcattagagcctgacacattctgacatattccacttagaaacaccttatcaataaaaaccaaatgcttttcgtctttggccacttaggaatcccacactggggacacagtccacgtttagtgggcaatgcttttggccagatgaggcgcaactaaaacttcagtacaagtttggggtaaagtgctgcattaattcagggactggcaaactgtggccaggaggccaaatctaggccactgcctgcctttaataaataaaggtttattggtacacagccactcccatttgttttcattttgtccattactgcttttgtgctacaatgacagagttgagtagttatgacagagaccatatggcctgcagagcctaaactatttattctctggccttttacagaaaaagtttgccaacccctgcataggaataaaaggaaaatagcccctttcaaggaacccctggaagggtccggacacaatgccggctcatggttgttttccattcctgctctgactcccaggctgcaatgcagtcaaagccctttgagctccccttgctaaataactttaacctttgtgaaacaagcagccatccttcttttgcagaaggaatgacaacgatcatttttccttgcaggttatggggtggttagccatgtgggcaatgggtctagacagccaggtttgaatccctcctcaccttttgagccctctgtgccttggtttacctttatgtaagatgaggataagaaaagcgtgtgtcctctaaggcttttatgaaaatgaaatgagatactaagaacaaagtgtttgttttaacttggactgcctcatcctacacgatcaatagagacagggattctggagttagaggatatcttgagagggcatcatcactgctgtctttctgaggagtaaactgaggtccagtgaggaaaagtgactctgctcccaccctccatagatattgaggcaggtttaggaggcagaggctccaatggtaacggctgctaatattttttgagctcctctgggtgaagggcctgggctccacacttgacttgtcatgtctcattgagcgttcgtggctgccctgtgaaataagcattttgtttaccccgactttacagacagggaagaagcgatggtgctggaactcacatctgcccaaggtgagcttgcaggagctcacggccaagccctggctgcctctccacgcagcggcactcatgaacacacttgggagcaatacaacattttgggttccagggatagaaggggtcaggggaattcaactagaaaatgcctcaaacaccaaattctccatctgggtaaaactggaacctttctggctacccctcttctcctgtgtacagcattgcaatgggtccatctagtggtcaaaggcaagaatgtccaccggtcgggcctctgaaaagcaactgagccaacaagccctcccatctcggccaatctcagcaggccaagggacaggcagcctggccagacgtcggccttaaggaggacctggcaagggacgtgtccatggatgtgcaaaggaagggggacactggcagtggccacctctccctcctcatcttttcagagccctgtaccccagttccacaggaagcaacattgcccctcagaggacattttacagtgtctggggacatttctggttgtcacaactgggggatctttctggtgtctagtgggtagaggccaggaatgcttcttaccactctacagtgatagggcagcccccccacggcaaagagtgagcctcaaatgccaacagcgccacacagcactggaaaccctgaggtgtcctccttccaaatggaaccgggcaggcctggggattccacgaggctgtgcgtgctcagaacccttgcatgtgcattcctgcctagaccgctctccccatccccactctcttacctcatcctcttccttcacctctcagcccacttgtctcctgttcgggggagctcatctgctcatgtctgcctctttgtctgggttttatctctccacatgcaggcctgagacaaggatttggaggcaagcagtttatttgagagaggattccaggaagcatctgtaagagagtgaggaagagggaccggaagtgtgggggtggaagcattgaagggtgagttgatgggcagccattgctgtgagcagccgaggtgtggtctctgaaggaggggggcgggggcatgaggactcagaactgtcccctccaggagaatgaagccaaagtgtttatccttcagctccctggctgttcctgcacactagccacttacattgcagctacctgtgcactgataaaggaactgatgtctgtccggtctgcacacatctctccattgtgaagggcattcaagtttgccctctctcaccctggtcctcagaagctaatgggtcactttcccaaattgaagctccagagaccaggaacagaggactggtatagttgatgagtctacacaacaggaggctggccccacctagtgcaaggatttgggaattgtgacatcaccctggaggcaatgctagctcccccatgatccacggccacattgttagggctatggaaacctgacggtttgagggcagaccaccaagagaattgttacatcacatccccagctagaccaggcttagtttgcttagtaagaaaggcaatatttttgttgaatttcacattttctaccaagtaacgaattaacctttttgaaatcgcagaggagatcacagcaggaaatgaagccatatcctgtacacgctggctaccacatatgaaccatcagagagatggagggcaatgtctggaagaaggacgggaagagggaatataagaacattcagtattaatggattccaaactccgtgtgataaccagccggtcctggaccagtttatcatcgcagtgtggactgattctcttttgcaggaagttagttttgacttcaccagctggattggagggcacctgtggcataccttgtcctattgctgtgggggacttcgtccagcttttagacatgcaagactaaatgtgaataccatctatacgtaagtggctgagaaaatgctgtggagaagcttacagctctccatcatcagcgatataagcacactttgattaatcaggtgaactgcatacaatcaggtagtcttgctgaggatgaagaactttatatggatttggggtaataggactaaagtccttagcatcacttgtttggatttttctcgtttcatgagtagttgataattcagcaaaggtttcttaagcacctaatctgaccattgcacagagggctaactgcggggaatacagcagaaatgacatctaaatggcacatagggtaccactccccagctgtgcccatgcgctgcagcgaagggaactacatttcccgggaggccttgcgctctcgcttcctggtagattcagccaatgggaggcactggccggagattggctgctgggaggaggagagaagcctggatgtgccagcctcttcttcctgtttctcatggcttcatccatgattttagctccagcacaaggcagtctctctctgtgctcccattgtgcctggctgggagggcacagagaccttgggctcagagagccccacatgcattctccttttgcccccctggcctaggggtgagatcagtttcctggtgttgctcatatctggattttgtctctacttcttgtttgactcctcaactcttcattcacctgtgccacaaacccccatattaagttctctctgcttgaaatacctagtgtagtttccgggattttggacatcttgcctactccttcaaacatatttcatatccctttccctcctgcatgaggcgtcccactccctggcatccttcttgatgttcttttttttttttttttgagacagagtctcactctgtcgcccaggctggagtgcagtggtgccatctcggttcactgcaagctccacctcccaggttcacgtcattctcctgcctcagcctcttgagtagctgggactacaggcgcccaccactgtgcctggctaattttttgtatttttagtagagatggggtttcactgtggtctcgatctcctgacctcgtgatacacccgccttggcctcccaaagtgctggattacaggtgtgagtcaccacgcccggccacacgtccttcatgttctaagactcccacctctttcttaccccagggccttggcacttgctttccttctgctttaaatattccttccctggagctccatgtggctgccactttctcatccctcaaactttctgttgccctctcaggtaacatgggaacaaaaagcaaatgttactttatcagaggctctcattgaaaatcatagctaatgcacccactcaccccaccctcactgcaatttactttactttctatcatgttgtcctgtttatttgtttcacatcgtgtatcccaatctgcaatgatttcctttacttgtttgcatagtttgaactcacgacaaggtcaaacgtaaggtggttttaaaataatgtgtttctttatcatttttggagctaaattttgggcaaggggacatgggtgttagagtttgtgaattcatcttcttgcagtggatgtgccctcgctcactgttactcatcctcctgaatggggtcagggcctgttttaaatggtaggtggcatttctctgctgttaagcatgtgattttctctgcatcagaatcctgggcagtcactgtctgggtggcagtgggcaccctcttctgtcagtgcttcaagggtgacaagcatctcattgcaaaacagacatgattcttttcactttatgacatgttgatcaaacccctcagataaattgttggtgccccatcctgtatcccctcagcctacctgtgttcatcttcagccatgaggggcagattgctgtaaattgacaacttcccattcaagcccttgtctctgcctgagggcttccccatcacaggagcctgcttcactgtgaatgtacttacctagaaaggggagcacaggcaagacccccagcccagagaattgagtttggatgctcacacgggtaacctgcccttgacgcctccattatctttttccttgcctcctccattcacttccctactccctcatttgtgcttcctgggaccaccttccacataagctgcctgcacccaagcccttgtctctggatccactttgggaggatccacaccaagcagaactcaattccctttttcttagcagcacttcctctttgtgccacatcaagatccacttctgtggaaaaagcctgtgtgggcatgggggcttaggcctgccaaagtctaagaaaccacgtggaccacacctgggaattgttcccctggggagttggagacgtgggcattttgtcctctactcgtgtccctacccatgtccacctctagcccttcctgccctcttggccatttaccttccctgttaccctttgctcaccgtcttcctcaccagaatggagaactggcccctggcaagctcgccccatggctgcacctttaaagttgtcttctccaagcgtgtgctgggctgtcagcagcgtcacccaggagctggaagtgcaaatgctcaggtccttccccagacctgctaaatcagagactcagagggtgggctccacccttgtgtgcccacagccctccaggggactccagggcttgctgcagccctagaagcactgctctaaagccatactaattagcattagatgtatagttcacaacagcttgttctgcttctaaccactggtcggaggggttggggcctgattatgtaacagcatatgatgactcattaatgatgagagatgttctcgtgtttaccaatatcttcatatcagtttgccaaagtaattcttgataccacacccagatgctgggaagaacaggggctttgggaactgaagccctcacattgacctccagccctgtcagtgccccatgcatccctggggtacctttccccatctgtgcatgctgttcctgggtgccgctatgacccccacagccagtgccagcttctctctgtgagcagctgtcccaaggctgctggagcccttgtgctcaccctgcttgcatgggggcctgagacagtccttacccagtgatgggtggatgcaagggacgcaagacatccctcaggttcaatgattcaagagaactcataggaaccagaaaggtcaccagattcacgattacctcttactacacatggttccaacactacacagcaagtcgaagtcagcagtgggaagatgcacctagggtgggtcccaggagagctctagctgtggtgctccagtgtcctctcctagtggggctctgcagcagtgcttagttctcccagtaatgacatggggcagcatgcatggaatattgctgaccagggacactgacctgagccttggcgtccagggtttttattgaaggcttggtcacgtaaacatgatggacaatctacatggctgacctggtctccagccccttgacagatcaagctgatacaagacctccactgtgaatcctatccttagcatcaactacctggtgtggcctaaggcctcggtaaacagacacttatcagacaggacattagagattaaaggacttagaggctgccttccaggagctgtgccagggccacacctttctttgggcaaggttaaccctttactacttgcagaatatgaatattccagctccttcatcgccagtgcggcctctctggggtgtgaccagccctgactctgtctcagaactccctagcaggaggaagccagaagcacccacgtggttcctggctcacttttttcactccccagtcccacctttccactgtcttgcctctttttgttgttgttgttctgggaacactttctaataaatcttcacacaaagacttgtttcagattctgcttccagggatcctaaaataggacactgtaagaatttacaaagtgatacatttcctgtatttcattaacctgcttatgtgaattactgttattttcaaacctcagaaattagctgcagctgctcttaagattaaatctggagaagccaagatagaacttggagttgagtctcgcagtggcaaccgggtctaaggaagggtcacctggctagagctggagttgacacccagccggtccaggaggggccgctcccaccagggactccaatcagaggtgaagggtcagggtgaggagagaaatgctctcacttccctcttcctctcacctccatctcttgacatcacttcccgttggatgaacctaaatggaagccagtaggcaagagagcctggaaaacagcgtttgcagggggcggttgtgaaatggatctaaaggcaaacaacacgtgatggacacatgtttcgtaaccactgatagagaaaaaggcaatagaaaaacattgatattaacttagtagcactttggataattaaagctaaaacaaaatcagaagccagaagagctgtatatacttacaaacaacagtgcaaatgtgtgtgcagcacctgttgggaggccctggcattaattctaggtccctccatccttctctaggggtgagcagccaacagggtggtgctttctctactagaagagtcaacagccacaacccctcaccccaacagcttcaaatgacatgccgagaacagcacgtagaatccccttatgtttacatggtgttggtgccctttgaaaatctgattagctcttttaattaccatggaccctttcagcacttagctggtaaatagctaactctaattaataactctctgtatgcttgggaaatatcacttattttactgtctgtccttctggtgccagtggctgccagagctcagcacctgggagtgaccccacttcactgtcccctgaccttccactgttgctctgcctcattcccctagaccctgaagcttctccacctgaggggaacgggatcaactgtgcaaactgcccagaaagcaggcatgccagggagcacttcctggactgtctgtagtgagctctgtggacaatgggtgtgtttttctctttagggctatagataaaccacctgacggccaagctgtctgagcgctatgtggttccaccatacggaagcatctgaagagctggcgaaaaagctgccagcaccctagggggtagagttcgcgtctctgactgctgtcccatccctgctcccagagaagtgcctggcatgtagcagggctgcagtgtgtctttgtggatggaacaagccctgatatttgggccaagcaaccaaatgccaggctggtggtcccacataagtgtggtggagtgggtctgcctagccacccaccagctgttaaggaggaagcggtggtgcctgtggtccatagagcctgaagccttagttggtggttgatctgctttctgggaggatcagaaattcccaaactttaatcaagtagcgttccagatgagtccagcgactctgcacaaaaaaactggaagccctcgaaggagacctaagttcagatcagggctcacacgttttctggctactggatgtgtttttctattgcacagatttgcaggcgctttaaatgagaatgtgtgccccggcacttactaagcacatcagcgaaagcttcacagcgcaccatcagccaggcctgctgctgctagaccctctgccagacactgagaaggaagacgtttgtgccctaggtcaaaggcaaaccctgggtcctagggaatgtcattgaggtttgcttaagtaaaatgttttcatttaggttatctatgccaataaaatgatgcaaaattcataaaagcaggtggaagcaaaatcgtgtctgaatgtaggaccctcttctagttcccttttgaagcagccgcttaggccgtctgcaattaagccgatttgacagtagagggcagcagagggtgccgtttcagggttcattcggccgcacaggcacaagctccctaccggctcggcctcagccggaggccctggcagagctaacaatggccggctccgccaaggcgcgagcaatgagctggataaagtctcaagcgacccccagctcaggcctgatggagaagctggttatgtgcacagcctctaactctgaccaacagcaggttaggtcagaggcaggactaaggggagacacattcccggtgtttcttttccttgtcggcatgtccagggtgtggggcagctgccggataaccccaattggggttatcgtggtgttcaggcttccctgtccctcctgcaagcagcgagcagtaccttgagcctgcagggaacatatgaagatgaagaacctcatcttctaactcctccagctcccagaaagcttgcctggaagcttcctccttgggcatcctctcccggtggggatggctgggcatggccagacagcccttcttccttcctctctccatcagtgctgagatgagcacggtgaaaatatccaacaatggggaagagaaaagatggaggcaaaatgcaagcacttggagaggaaagagggcctgggaaaaaaaagtgaatcacattttgagccattttccttgttttttgtttctaaagatgctgttgccctagctctgagtatcaaggttagtaagtgatccacgcaaagacagtgggactctggttccttgtagaaaccaccgatgaacccaagctattttatttttttaaattttattataagttccgggatacatgtgcaggatgtgcaggtttgttacgtaggtaaacgtgccatggttgtttactgcacctatcaacccatcacctaggtatttagcactgcattcattagctagttatcctgatgctgtctctacccctgccccacgacaggccccagtgtgtgttgttcccctccctgtgttcatgtgttctcattgttcagctcccatttattattattatttatttttttgcaaagtgaaagcaaggttattaagaaactaggccaggcacagtggcttacgcctgtaaccccagcactttgggaggctgaggggggtggatcacgaggtcaggagtttaagagcagcctggctaacatggaaacaaaaccccgtctctactaaaagtacaaaaaaaaaaaaaaaaaagaaaagaaaaaaaaattagctgggcgtggtggcagtcgcctgtaattccagctactcgggaggctgaggcagagcattgtttgaccccaggaggcgaggttgcagtgagcctagatcatgccactgcactccagcctgggtgacagagtgagactcaaaaaaaaaaaaaaaatgtaaaggaataaaggaatggctactccgtaaacagagcaacccctagagctactggttgcctatttttatggttatttcttgattatctgctaaacaaggggtggattatttatgcctcccctttttagaccatatagggtaacttcctgacattgccatggcatatgtaaactgtcatggcgctggttggagtgtagcagtgaggatggccagaggtcactctcgtcgccatcttggttttggtgggttttggctggctaattttttttcttttttcttttttttttttaataagcaaggtctttatgatctgtattttgtgccgacctcctgtctaatcctgtgacttagaattccttaaccgtctgggaatgcagccctgtaggtttcagcttcatattacccagctcctgtttaagatgaagttgctctggttcacatgcctctaacattcccttttataagagagcccttaatcctaagggttgcagagggacaaagatccatcttctgtaacttcttcaggctgaataggggcaatgatattgtctaactatgagggtctcttgcattcagggtagagaggcagctcccacttatgggtgagaacatgcagtgtgtggttttctgttcttgtgttagtttgctgaggatgatggcttctagctccatccacatccctgcaaaggacatgacctctttcctctttatggctgcataatattccatggtgtatatgcaccacattttttaatccattctatcattgatgggcatttgggttgattccgtgtgaacctaagctaatttcttacccattccaggtttcatatttttattcaggcaggcacccctccctggagtttatccatctacctctctgtctgaaaggaaggtctactggtccccacacttacctcatccacctgctgagctgccatactcaggactggctcttccccaggcactgggagcacccatcccaggccacgagaagatcagtcagcagctcccagcttagtaaagtcagcctcagtgttggttgtgttgtccagcgtgttctgggggtcagatgtcccatattttacccagatatcctcataaccctgttcttgcctggggtactaacccaactagctcaattctgcttgtgccctatttcttggttcctggacccaggaagcacttccacctccccaagttgtagttctcatgtatagaactaaagttcgtgccatctctgaggacaaggggcagcttctatgttgttttttttaaaacaaaatatttaacataatattttttaaaacttctatttcttggggaactcaaagcattccttgagccaaggtctgctcctcagaggtcatatttgggggtggtccacagaacccgagagaaggatgctaggggagctgtaagcagaggctgggggttctggtccttctgctcagccagtctcagctccaaggagtgaggctccatgttggattcctatctctgacagtaaccatggcctgtcttttctttgcaaaacaattccaaatttatcctctcttctttcatttaagaaaattaactcctgcgttaaattgttcagtctaatttcaattgttcaaattgctcaatctttggttccctcatagcaccatcgtttcacaaggatcttggatggaagccactctgggttttaacttcatagtctttatgtcatcataatgcccacggtgcagagtgcagggtgccttagccctgccaataaagccaggactgtttaacactcactccttcctaaactgggagagagcgaatctggttcaaaagtgcaccagaaatatagagcaattgagatgcttaaagatatgaagcccaagaaatattccattaaaaatggcacagtctaaggcagctcaagctcaaaataaatgaaaggttcaggctgggataaccccaccaacatattcaagaagggagctatttctggattgaccacatctgacctccagcttcatttcttgctgctgtggggactagataggcaacaggaggagaaaaggagaggattttttggtttttaggcccaagcctctggcccacactgatcccaaagagggtatcctcagttgctgctgcctttctgtcctcttccaacttatttccccaaacgcaggccagcgctgttcaatagaacttcgtgccatgatagaaagattccataactgcttgtgcaaaatgatagccacctgcctcgtgtggctactgagcacttgaaatctagctgctgcaactaaggacgtatttttttaaactttatttaacagcagttaaagtttaaaaattaaaatggaaatagccatgcacagctaatgactgttgtaatggatgatgctgttctagatgattaatgatcctggcttgctgtcattctctccaatattgcatctatcttcattcttaatagtttcagtgtgtgcacacatgattctttgtagaacctggcctctcagttattgaaccctgattcttcacccatcctatcctccactcacttttatcattgatttgagatgtcattagcaataactacagctctgctactatcttacttttaaggacttccctttctgaccatatttctagtttactttctctagaattctaaggccagcaatcctgcaagcctactaggatattcatcccattgatcctaccacatttcaccttgttggtcctgaatatttttatattattttaatacaaaaaaattaaagctttgttctgggatgtaggtaaggggacagaggctgggtgctgtgatgagagcctgtagtcccagctgcttgtaaggccgagacaggtggattgcttaagcccaggagttcaaatccagcctaagcaacaaagtgagaccctgtcttaaaaaaaaaaataagaaaacaatttttgatcttttaggatcttgcttttaagttttgctcaataaggccagagtagcccgattttgcccctctgttgagataataaccttctgagtactctactgatgcctgtgtgttaggaggctttgcagaagagcagtggtaaaacactcgctgttttacctgcatgagtgctgcaggctgtcccctcctctcctttctgatggttcttcttcagccttgcccacttgcctcacactcaagtatgctctgctgaagacctatagaggactctgggccctctgtggccgtctgtggatctctgcagccctctccggccctctgcagctccacgaggccctctgtggccctctgcagtcctctgtaaccctctgtgactctctgtggccctctgtgtctctctgtggccctctagctctctgtgcctctttcagtcttctagagttctctatctatgcagtggacctctctgggattctaccgctgtagcctccccagattcccagctccatcttctaaactcagggagatcactgggtcctgtacatatgtgtacacacacacacacacacagagagagagagagagagagagagaaccagttatttagttctttaagatgggagggtagctctgattcctgttactccatctttgttggaagcagaaatcctcctttctactattcctcacccccactttcccagctccaatctcgtggtcagtcactatcaacaccaccttgctcctctctcctcctagcttggcaacccacaaccctggtgaaatcaaatctgcctactccttgcctactttggtgcagctgaacatgcctgcagggaagcacacaccacggccgcatgtctggcttcaacttcatggctgtgaaaacctgaggcccttcatgctgcctggcagtgccgttgcatgtccctcctctctcatgttctctaaatggccatgtcacaccttctcttctcttctcttctcttctcttctcttctcttctcttctcttctcttctcttctcttctcttctcttctcttctcaattccccatatctcttaccccattctctctctcagcttctacctttactggaaaaatttaagtaaccagataagttccaaagacagtcactgccacctttactcatccacctttctttgcaccttcacttctgccttcttgcctctttcgcaaagtaacaccacctttctctctagtgcacgaggtctcagctttgttagggattctaccctctctctcctacgttgccagctgttggctttgtattggatcattcccatcactcaacaagcttatataatttctctcatctgaagatcactctcatgacccttcttcctccagcttatgtacatttctttgctttccatttgagacaaaactctgaaagatgtcacttgctgtcattaattcattgcttcccactttcttttgattccactctcatcagactagaatccttgaactcaactaactgctcttgtcaagatcaccttgacctccatgttgctgaagccaaaggtccattctcagtcctcatccgatttgacccttcagcagcattggaaaagatttattgagtgcttccaactccttgaaacattttctgcatttggcttctaggacaccacacactgctttgttttctctgtcacctttgccagtttctcctttgtccatgaccttgtaatgtcagctctttgtcttctttttaaagacactcccctttgatgaccccattttgtctcatagctttaaataccattggtatgctataacttccatgtttatatttttaacctaaatcttttcctaaattccagatttatatacccaactgcctactcaacctttccacttggatgcctaagcacatctcaaggtgatcatagctaacacagaactcttgggttttagcctgagcctgttccactgccacctttccatgccagttaatagaaactccaccatcccaacagcccagggaacatcttggtggcattctcaacctcactttttcacttatctctacatcaaacctgttataaaacccattggctctatcttcagaatactgagaacctgaccaattctcactatcttttctgctactaccctggtctaaataccatcatctaatttttgttttcttgtttctgtccctgtttccttgtaatctattcccagcatggcagccaggtttaagtaatccttagaatacttgagtaacctgatatcagtgctgtgctaataaccttcagggcctccgttttattcagaataaaagttttattctgaataaaactccttgccgtggcctggaagtcccacagatgtgggtcctgctgcttcctgacatcagctcctgggatatttccttttgctcattttgttgcagccacgctggccactgtaatctctgaaatgtgaacactcttcctccatatgtcagtttgactcactcctgcacttcctccgagtctttcccaaatgccacctttccaatgaggcctccctgagcacttcgtttaattctgtaactgccccaccctctctgctctgactcaattctgctgtactctttaccatttcctagataatttactcacttattactctgttttacctgtttccaactgctaggatgcaaccaagttcaaggagggccagcattgttttgttcattgatgttttcaagtacccagaacagtgtcagcacatgtgaatctttaataaatatctgttaaatagaaattgactttcacaattctcttgtctaagtttgtgtgcttttttcatctgtcatggaatttcctgctgttcattttaatctgatctgacctggataaaaatatcaaagtgaggaggcagagaatgctgtttcaatagctttggaccatgaacctattttaccttaaaaattttatgccaaagaggctgggtttaagaccaggcaggacaatgtgctccttctttggacaaagatgtcacaagtgcccccgtccattgtgatgacaagagtctctgctgtcctcctgcagtggtggtaactgtgcactgatttttcacctgctgtcttcccttcaggccatggagtgagagcgggcagcctctttcccagttagggctctgagacagagtcgtgccaattgagcatacaatctgatgacctctgtgcttccaattaagttcagtctcccaactctctgctcagcttcacttgatggttaatggaaatgagttgtgtttctagatctgagccacacacttggtgtttccactgtcatttgctgagtgcaagtgcagtatcaaatggctcccctctgtgcctcacaggtgagacctaggaatccaaagctttcacctcctctgctccaccccattatccgtggatgcaactattgcacgtgggcctgccctgtgaggctgtgggcgacattgcaacaagattctctgctgccagtttgtagcccctaaacccagtgcatccctgacatccagcaccagtgaggaacattgcagaatgaactggtggtggccaattcagcagccacagcatcttcagtggtttaatgtaaatatacacaattatgaaaacaatgccctgcaattgtgctcaaagtctttgccacaacaactcctctcctcttctccttgccgtaattctctcttcctatcttatgacttaggaggttcaatctattctccccttgccagaggaattcagaacgctgtcaaacttaaatagctatgtaatgtatctatgggcaggttggctgtgggaggcttggaagtcaatggtattttaaatattctctctctgtgttcaagactggacctcaatgtgtctggacaagtagagagaaagaaatggcagtaagacctgccctgtctctgttcagtgtgcagtgggaaagtccaactcttcactcatgcaggcatcctctgataggcacagtagtgtttgtgtgcatgtgtgtcatgcatgtgcatgtacatgcatgtgtgtgcacatgtgtgcgcatgtgtgtgctgagctacctgtaaagagtaaagcagtaattactcccgatgagctggacagaagcctccctctttactggagagaacgacttgaaactgagtgtggcagggttgggggagagagtgctggcaccagcagctgctttaataatgccactcacctttgctgattaatatgcttgtcaaaataaaaggcaaatggaaatgaccccacagcacagagagtgggatgggattggccgagccatctggccccagattaattgctagcactttcatctcctctcctgggctccagatacaatgggatgataatggaaaagaaatgcacccagatctgtctatcttgctccttgtattcatagctgggcccagagccagtcatgctttgctggcatttagttccccagggggttgaaagaactcaggcatctttcccagaaaaacactctccaaaggcctcaacagtttgcagcagagctctactgtagctctactcagcttcatcaataagggcaccatagggcaaagcaaaacagcttcccacctgaaaacaagagcaccctatcagaggaactctaagaggtctgtttgctttacccagaaatgaatgcagctgagttaggaggcccaggaagggaagagcttgtccacagcagggataatggagaggcactcctgatagcagactggaaagagttggacactttggtctgcacaaatggatcttgagttacactggaattgtagatgatatagacaatgaaaatggttattcccacagcccagaataatggcactaggaatcatcccaggaagcttcaaaggagctctgtacttatagttcaaaaaacagcttgcattttggggaagaaacagtgaaatgctatgttttcaccaaaaatgctttattttccccctagatatacagaaagaggatatttccatgtcccttttggttgagggtagggaatctgactttgttctggtaataggatgtgggtgcagtgaggtagcttgatcctgaagcctcccatggggtctctgtgttctctctattccatctctgcttctcttgtggaggtcctaaaggaaggtggagcaacaagagagaaggatcctgggtcccttagtgactctgtggagcacagccactcccacccctacccccagctactcctctgagccaaagtcagggcaaacaaggaataacctccctagtgtgctaagcctccgtaacaaagtaccgcaggctgggtgccttaagacaagagaaaggtattgtctcacattcccggagcttgccctgggccatgttcactatcaaggctccagggaaggatccttccttcctctttcttgtctctgtggttgctgggaatcgttggcaccccttggcccatagaggctccaccccagtcacagcctctgtccacacgtgatgctgtccttctgtgtctgcatgtgtccacattttcctttcttataaggacaccagacatggctcagggcccaccttaagccagcatgactccttcctaagttgattatatcttcaaggaccctgtttccaaataaagtcacattcacaggtaccaggaattaagagcatatcttttctttttgggaacacagttcagcctgtaacagtgtctataatttggagctcatttgttacagcagctggtgttacttgctctgactaatgtatgtctggcattggtcccaacttgggcataactttctccaggaagccctaccttcctgacttcaaacctagatggggtgctgcttcacagtgggttctccacattgccctaaactccctctatcacagcattcaccatgctgtgccatcatgtcctgctcacatggacaagtggactcttgtctcttctctgctacactgttcatgccaaaggcaagaatctgcctttcctgctccttgttgaatatcctggacctggcatgcagtacatttcttaatcaatagctctcacatgaatcagtggatgctgtgagaaagactgcctgatgtggcataagcagcatcaggtcgactttctgccttcaagaatcttgcagtcatttatggcctccttgttgccaactcccctggcttattctcctcctcatgccccttgtcttctctgctttattcataactgtggacactctggaacgtgtacacatattaatgtcatttaagagtctggctcctagaggttgttatctcagctctctgccgctcaccccagcatcaatcccaccttgaaacctgcttgttctcattactttgggactccttgactctccccttaaacatcacacctctaacagaaggattttcacttactccatgcatagaaggtgttggtcacattgagtggaattccttctaaatccagctcccagtccgtgacctgcatggcagtggcccctcacactgagagagtgagtctccccttgaaacttagttgcttctttcctctatttctcagaagtatcacatctcagactgttaaagctgttctcgtggaaccattgtagccctcagggatggccgggtcctgatgatcactttgtccacaagcactgatgttttttaacttaaaaaaattgactttgtttttgtgtattcatttatattttttagagacagggtctcaccctgtcacccatgttggagtgctgtggtgtgatcatagttcactgcagccttgaactcctaggcttaattgatcctcagcctcccaagcagctgggactacaggtatacaccatcattcctagctaattaaaaaaatttttttgtagtgacagagtctcactatgttgcttaagctgttctcagacttctggccttaagtgagccccctgcctcagcatctcgaagtgctgggattacaggcgtgggccactgtgcctggccagactttatttcctgagcagctttgggctcacagcaaaatttagctaaaaatacagtttccatctatcccctggcctcgcacatgcaagcctcccccactgtcaacattgccacaactgaatggctcattgtcgcaatcaatgaatctacactgacacctcattatcactcaaagtccataatttacattagggctcactcttagggctatacattttgtgggttttgacaaacaggtaatggtgtctatcaactattatagtatcttacaaaatagtctcactgccctaaaaattctccatactccaccattcatccctcctcccccaacccacaggaaagcactttttactttttttactgactccatagtcttgtcttttccaaaatgtcaaatagtgggactcatacaatgtgtagcctttttagattggatttttaaaatttagtagtatgtatttaaggttcctccatgtcttgtcatggctgaataactcatcttcagcattgaagaatattccattgtctagctgtatcacagttattcacccattcacctactgaaggacatcttggttgcttccaagttttggcaattataaagaaacctgctataaacatttatatgcaggttttagtgttgacaaaagttttcaactcacttgggtaaatatcaatgaacacatttgttaaattgtatggtaagagtatgtttagtttggtaagaaacagtgaaactctcttcccagacagctttaccattttgcattcctaccagcaatgaatgagctcctgttgctccacatccttgtaagcatttggtgttgtcagtgttttggattttggaaattttaataggtgtgtggtggtatctcattttaatttgcatttcttttaaaacatatgatgtcacacatattttcatatgctttacttgtcatccatatatctttttttgtcagtgtttgttattttttgtcttattgaaaatagccataccaactggggtcagggtgagatgatactcattgtggtttgaattgcatttccctgttgattagtgatattcagcatttttcatatatttgctggctatttgtatgtcttcttttgagaatgtctgtttttagatatatgtatatatatatatattttgctgttgaaatgtttgagtttcttgcatattaatcccctttgggatgaatagtttgcaaatatgttttcccgttctgcaggctgttgttttactcagctaatggcttcctttgctgtgcagaagctctttagtttgatgtaatcccatttgtttatttttgcttttgttacctgtgcttttgaggtcttattcataaaatattttcccagaccaaagtaatgaagcattttccctgttttcttctagtaattttatagtttcaggtcttacaattaggtctgggatccattttaagtttatttttgtagagtgagagttttattcatctgcatatgaatattcagttttctaaagaccacttattgaagagacagtcctctccctcagtgagcgacctaggcaactctgttaaaaatcagttggctatagatatgtgaattaacttctgggtccactgtactgtacaattggtatttgtgtctgtttttatgccagtaccacactgttttggttactatagctttgtggtatatcttgtagtctggtaaagtaattgcctccagttttgttctttctgctcaagattgctttgggtatttagagtcttttatgtagtttagattttttttctatttttgtcgttttgtcaaaaatatcttaactattttgatactttattttctttttttgttgtgtcattttctggttttggtctcagggttatgctggctttgtaaaatgagttaggaagaactcactcctcttcagtttttttgaatagtttgagaagaattggtatgcatttttctttaaagatttgatggaattcagcagtggagtcatctggtcctagacttaactttattgggagactttttattacctatttaatattttcacgcaatattggtctattcaggttttctatttcttcttggttcaattttgataggatgtatgtgtccagaaacttatccttttcctctaagtttttgaatgtattggcatatagttgtttatagtagtttttaaggctcctttttatttctgtgctatcctttatgatgtatccttttccatttttgatttcatgtacttgagtatgttcccttttttttcttagtctagctaatggtttgccaattttatcatttcagaaaaatctattttttgtttcatttatcttttgcattttttttgttttaatttcatttatttttgcttttttttttttttttttttgacagagcttcactctgtcacaggctggagtacagttgtactatcatagttcactgcagtcttgaacttaggctcaaaacatcctcccaccccagcctcccaagtagctaagactagaggcatgaatcaccactcctggctaattttattttaaattttttgtagatacatggtctcactatgttgacaaggctgacattgaactcctgaccccaaatgatcctcccttcctggcctcccaaaatgctgggattactgacatgagccaccatgcctggccttgatctttattatttctctcctatgaatttggcatttggtttgttcttgcttttctgatttcatgaggcgcatcatgaggctgtttatgtgaaatctttctaattttttgatgtaggcatttattgctataaacttgcctcttaatactgcttttgccatgacctataggttttgctatgttgtgtttctattttcgtttgtttcaaggaatttttaactatcattattgatttcttccttcacccattggccttttaggagaatgctgtttaatttccatatatttacattattttgaatattcttgctattgatgtctagttttattttatttcattgtagtcaataaggtacttgatataattttgatttataaattttttttcaaacttgttttgtattctaacatgtggtcaatcctaaagaattttccatgcactgatgaaaagaatgtgtattctccagctgttgggtgaaatgttctataaatatctgttaggtccacttggtctatagtgcagtttaaatccaatgttgttgttgttgttttaattgtcattgttaatttactgtctagaaggtctgcacaatgctgagattggggtgttcaagtccccaacaattatggtagcttctcctttagatctaataatatttgctttatatatctgggtattattaggtgcatattaggtgcatatatatttatatatatatttataattgttatagtctctggctgaattgatccctttgttattacataatgtctttctttgtcttttttgacagcttgtgacttgaagtctatttttgatacaagcatagctactccttgcttttggttttgtccaaaaaaccaaaagggatatatttcttagatacatttttatccctttactttcaggctacatgtacctttacagataagatgagtttcttgtaggtagcatatagttgggtcttggttttttattcattcagttagtctacatcttttatatgggtgaatttatcctgttcacattcaaggttattattgataagtgaggacttactcctgtcattttattgattgttttctgcttgttttgtatatcctttgttccttactttcactcttattgtttatttttgtagttgggtggttctccatagtgataaggtttgatttccttctcttccttctttgtgtatcagctctaccagtgagttttatagttttctgtgttttctgatggtagttattgtctcttcacttacacatgtaagactctcttgagcatttcttgtaaggccagtctagtggtgttgaattccctttgtttttgcttatctgtgaaatatttaatttctccatttctgaagggtagctttgtttagtataattttttttttactgtcagctttttattttattttattttttagtacttggaatatattatcccattcctctcttgtttgtatgatttctgccaatacatttgctgttagtctactgtgaaatttctttatatgtgacctgatgcttttctcttactacttctagaattctttctttgtctttgaatcttgataatttgattatactatgcttcagagatgacctgtgtaagttgaatctatttgaggttctttgagcttcccgaacatgcatgttcatctctagtccatgacttgggaagttttcagctattattttattaaatatgttttctataccttttcccttctcttttccttctggagtatccataatacaaatattggtttacttaatgggtcctagaaacattgtagactttcttcatactttttaatcttttatttttctttgcctgtgttatttcaaaagatctgtcttcaaggtcagaaattatttcttctgcctggtttagtttgttgtttcacctctcaattgtatctccatttcattcattgaactctgtagctgtaggatttccatttagttctttttttaaaaaataatatatatctttttgttgaaattctctttcaaatcatgacttgttttcctgatatagttaaattttctgtctgtattcccttgtacctcactgagttttaaaaacattattattttgaattctttttctttatgattcaggtctgttacttgagaattattgttttcctttggaaatgttatgtttccttgctttttcatggttgatgtgttcctacattgatttatatacaacagatggaaaagttgcttcttctaattttatggagtagatttcttagggaaaaatttattcatatgagtgggtcttggattgtcagtttggtggacatgtcggccttggctctaggtggatgcagtggtatagtctccaggtagtttctttagctgtaatccacactagtgatgtttgaagtttcttagtggcccaggctgagacagtttgtggtggtggaggcacagctttgccaggagtggacttgcagggctatttctcaggtgaagcatgtgtgtgcacacattgggtcagccaacttggggtctggctcactagggttgggacatggagctgttactctggctgggaccacggccatgtggttactcagctgagctggggtctgttttccagaggcagcccacagggatgtttctcaggtccaggaaacaatctcatggcttcttggctgacctgagtatgtttctgctagtggtggcctgtggggctttttctcagctccagtatatgggtgcaaagcagcttgtctggcctgggggcccacagggctgtttttcaggcctgaaacatgactgcacaatggcacagttggcctggggacatgtctgcagaaagcggcctatatggctgtttctcaggcccaggatacaatctcacggcatcatggcttgtctgggtgcatgactgctaggagtggcccatggaacttccttaggccagggatgtgggtgcgaggcagaagtttactgatagaaatatattggggtccagggtgaagttatgatacactttacatttttaaaacccaggcagaagagtatatatttgcaaaagtcagaaagaaagaatactgataaaagaataatagggtccacccagccagaatggagttttccgggctatggagtgggagggcaaaggagggaagagggagattgcagtctgtcccacttgccatagggttaatggatatagatggctggagctgcctcaggccaaggctgccactggaagagggtcggactgtgctccagaacctgttccccttaccttcccaacatcgtctcaccttaaccatcccagtgtccaataaaaatggccactaactaatgcctggtaaccagcacaattgtcagcagtgggttgctggcctcctcctgattttccctggaccatgtttctggacccagggcatctttccaggtgttccccacaatggttgatcagaaaccctggggacacagctggaatttgagtagtttgaatcatctataacctcatcaggagctagattctggtttctggccagtatcattttccttctctgaagaacttctgtaaatattttttgcaaagcaattctactggcaacaaattatctcattttttgtttgtccaagaacacctttatttcaccttaaatattggataatagtttcacagactacaggaaatttagattggtgggggttattgttcctcaatattttaaacatttcattctattttcttcttgcttggatgatttgagaagtcagatgtgattatttttgctcctctgtagatcaagtgtttttttcctctgacttcttttgagatgtttttctttattttttattttctgcactttgaatatgatatgcctaggagtcatttttctggcatttatgctggttggtattctttgagctttgtggatctgtggtttgttgtctgacaaaaaattgatgaaattctgttactattgcttcaaatgtatcttctgtttttgtctattattattattattttttttgaggcagagtctctctctgtcacccaggctggagtgcagtggcgcaatcttggctcactgcaagctctgctttctgggttcactccattctcctgcctcagcctcctgattagctgggactacaggcactcgccaccaggcccagctaatttttttttttttttttttgtatttttagtagagactgggtttcactgtgttagccaggatggtctcaatctcctgatcttgtgatctgcccgccttggcctcccaaagtgttgggattacaggcgtgagccaccacgtccagccttattttttgttgttgttgttgctataacaaaacgccacagattgggctatttataaagaaaagaaatgcatttcttacagttctggagcctgggaagtccgatatgaaggtgtcagcatctgaggagggccttcttgctgagtcataacatggtgaagatcattttatggtgagagggcaaaagcatgtgtgtaagcctaggtctttcttctcttcctataaaaccaccagtcctgtcatggggacctgatgacctaatctaatcctcccaaaggtcccacctctaatcaacatgtgaatttggtgattgaattttcaacatctgaaattagggagacacactcaaaccacagctgctccttcttcttcttctccttctggtattcgcattacacatatataacctcttttgtagctgttccatagttcttggatattctgttttattttttctgtctttttctctttgcttttcagtattggaagtttttatagacatattctcaagcttagagattctttcctcagccatgcccagtctactaatgagcttatcaaaggcatttgttatttctgttacagtgtttttgatatttatagtttcttcttgattctttctcagaatttccatctctactcacattatcctctgttcttgtatattgcttattttgtcatttagggcccttagcatactaatcatagttttaggaaaatcgctggtcttacaatttcaacatttctgccacatctgactctggttttgatgttcactcagtgtcttcaaactttgtttgttttttgccttttaatattccttgtgttttcttctagatacttgaatatgatgtattgggtaaaagggatgcctttaaacaggcctttaatgatgtggtggtaaggtgtgggggaaggggaaatgttctatagtcctgtgattagttttgagtctttcagagagtctgtgactctgggttgtaaactttgtaagtgcttttctgtctccccacttcttaggtgggacatgatggatagacaagtcaggaattgtgtacttctcttctatgtggaagggtagagctgctggagttgggaattttgcttctcccaggcagggtagagtctggtaaaacttaaccttaggttaggttctggctaaatagtttctcctgagggcagatcttgttaaaaagagcagagtgctctggcatatttaataatggtttctatttccctcctcctgccagaagcatgaagaaatttttctcccatttttgttgtgaagcatgctgggctcctggaggtaaaactcacaaaagtgttgaggtttccctctaactgcactctcccagcctgttttcatcttgctggcttggccacgctgaacctccagcaatttgtcagttatgggtcaggtcttcctaccacagcatgggttcccacagaggtgtctgctttgagtttcttctatgctaagttgtgattcgctgtaccaccatctttacacttttaaaggcagcagtttaccttgtgaccttacttttctgaagagtctataaaaagttattgattttgtagtttgttcagcttctcacttgttgtgaggacagagcgacagcttccaagctccttacatgctggactgggaagtgggagtcagcattgttttaagttgagaaagtcacagcgcagagaggctggcttgcctatggccacctgattagcaacagagatacttctgtgaagcaggtctttagacattagggtatgagtagactccatgccttctctctagttgttcctcagagataccacaaagaaacagaatataggcttgcatcttttgcaaaatggttgcaatccactttgaactgtgatcagccatttgttggaagctaatttgctctgctagtggctgttattgtgcttgatatggggatgagagggaatgtttactgaatgtccaccatgtgccagagactgttaggactttcatgcactctatctcctttaatcatcctcagggattaatgggctagatcctatttcaaaggtgaggaaaaaggtttagatcaatggaccagataccactttaaagatgaaaaacaggtttagaggttaaacaaggttaaatgtggtcacacagcttgtaggaggtgttctttagatctctgacccccagggcccatgcatggtgtttggggcagggtctggtggaaatgttttaggcaagaaatgaaacccactaaccctgaccctcacttctttgaataataaagagaagtgacttctagataagatgactatatttgctatctatgttgtataacaaattactccaaaatttaggtgattaatacaacaaatatttattatctttgtgggccaggaatccatttgtggcttagctgggtgtgtctgattcaagggctctcatgaagcttcaaattgtgggccagggctgcagtgtcatctgaaggtctgatgagttgggagtgggtgaagctcactcatgtggctgttggcaggctcggctccttgccatgtaggctccctgtacagggctgacttactacctgctgccctggggtgagcaatccaagaaagggaggagagggggcggggggagggagagagagagagagagagatcgatcaagacagaagccacagtcattttttaaaaaaaattatctttaagttccagggtacatgtggaggatgtgcaggtttgttacataggtaaatgtgtattatggtggtttactgcacctatcaacccatcacctaggtattaagcctagtattcattagccacttttcctaatgctctctctcccccaaccccaccccactacaggctccagtgtgtgttgttcccctccctgtgtccatgggttcttgttgttgagctcccacttataagtgagaatatgtggtgtatggtttactgttcctgtattagcttgctgaggataatggcttccagctccattcatgtctcagcaaaagacatgatcttgttcctttttatggctgcatagtattccatggtgtatatgtattacattttctgtatccagtctatcattgactgagtatttgggttgattccagtctatcattgactttattcagtctataattgactgggcatttgggttgattccatgttttattattgtgaatagtgctgcaatgaacatacgtgtgcatgtatctttgtaacagaatgatttatattcctttgggtatatattcggaaatagaattcttggagcaattggtgtttctggttctagatctttgaggaatcaccagaccgttttttcacaatggttgaactaatttacatgcccaccaacagtgtaaaattgttcctatttctacacaactttgctgccatctgttgtttcttgactttttaataattgccattctgactggcatgagatggtatcttactgtggctttgatttgcatttctttaatgagcaatgatattgagtttttttttttttaatacgtttgttggttgcatgaatgtcttcttttgagaagtgtctgttcataacctttgcccactttttgatggactggtctgtttttttcttgtaaacttgtttaagctccttgtagattctgaatattagacctttgtcagatggatagattgcaaaactttctcccactctgtagattgcctgttcactctgatgatagtttcttttgcttgcagaggctctttagcttgattagttcccatttgtcaatttttgcttttgttgcaattgtgtttggcaattttgtcatgaaatctttgcccatgcctatgttcttaatggtattgcctaagttttcttctagggtttttacagttttgggttttacatttaggttgttatttcatcttgagttaatttttgtataaggtgtaatgaaaaggtccaggttcaattttctgcatatgtttagccagttttcccagcaccatttattaaatagggaattctttctccattgcctatttttgtcaggtctgtcaaagatcagattgttgtaaatgtgtagttttatttatgagttttctattctgctccattggtttatgtgtcagtttttgtaccagtacaatgttgttttggttactgtagctttgtagtatagtttgaaatctggtagtgtgatgcctccagctttgttctttttgcttaggattgtcttgtctatacaagctcttctttgtttccacaggaattttaaaatagtttcttctaattctgtgaagaatgttaatggtagtttgatgggaatagcattgaatttatacatttccttggggagtatggccatttttatgatattgattcttcctatccatgagcatggaatgtttttctattcttttatattttctctgatttctgtgagcaatggtttggttctccttgaagaagtctttcacttcccttgttagctgtattcctaggcattttattctcttggtagcaattgtgaatgggagttcattcatgatttggctgtctgcttgcgtgttgttggtgtataggcatgcttgtgacttttgcacattgattttgtatccttagagtttgctgacattgcttatcaacttaagaagcttttgggctgagacaatggggttttctagatattggatcacgtcatttgcaaacaaacacaatttggcttcatctcttcctatttgaataccctttatttctttctgttgcctgattggcctacccagaacttccaatactatgttgaataggagtgttgagagagggcatccttgtcttgtgccagttttcaagaggaatgaaagccacagtctttttacaacctacactagaaagtgatgccctatcacttctgccatattctgttcattagaaggaagtgactagatccaacacccactcacgggaaggaaattacctagggatgagaatatcaggaggcaggcatcagcaagtgccattttagaggctacctgccacaatgaccatttgtttattttcccaacacagtctcaatctatgcctttaaatatttgtcccggttaggtttcttctttccctgtttctcttttcttcctttccctctaatttctatacaaataaaactataagctataaggtggggccaaacacgcttgaaaaaataaagaatatttacatagtcaaaaaatactccccttagtatacatatttattacaaaggggaaaaaggtagctttacagtggagaagtatggcagacatcacctgaatttgacgacaaaacctaactcatcagccacaggacaagtcgaaagcatgtacaacttgataggatggaataagaagaacacagcatcgtgtatgtgatattcctgctggagatgcatatcctgcatttaatcatgagagaacattagactaataaaattaagggacatgctatagtctgtactcttcaaaatgttggagtcatgaaagtcaaggggagaccaagggactcttccagattgtaggcaattaaaaacacatgttgaataaatgcaacctgtgattctgagctgcatcattcttctacaaaaaaattactgaagtaattgataaaacctgaatgaaatctcaggactagatggggtaatgcatcagtgttaatttcctgattatgatggttctattttggttatgtaggagaatgaccttgtttgtaggaaatatatattatcataatcagaagtgatgggacattgccttagcaacttactcttaaatggcttcaaggaaaaaaaaagttctgtacttgtaaatttttataacttgtagaagtacttacagcttttctgtaagtttaaagttgcttcaaaatataattttaaaatgccacaattagagtaataagttatatgattacctcacttgtggatatagatgctcccctaaaaattctctctccatacttattgctgcccaaaatactaattcattctcatagttatgtccttttctctagagaaaaatcttgtgcaaagcaatgtggaggacaaagcaaagttctgtggcagaactttggaatgtcaaatcttattaaactctcctatgcaaaggaattagaagaacaaaaataaatcccaggtttggaagctaaatttatatgaaggagaagttgaaagatatttcattacccagcaaattcttaaaatgtcatttcagtccaaaagtgaaactcttgatccactatgaggcctttacaaattaaattagcctcacttatttccatatttagtctataaaatagaaacaaaaaggcatttgtacattctaccaaactatatgccaatgatcgtagcccaaactctttctttacataggttgtcaaggttgttaccacaaaagcaggtatcgtacactccccaaggttcacaggacctgggtaagagaagaggaaaggcaatgaaagtgtgaagatccttgaaataaagatgatctccaatggtagtaacaccagaatccagatacacagaaacagactgaagaaatgagaggaataaaagggaataagtagaagttggagtttataagaaactcctgtagaaactattcaatacctgaataactgcaaatactttaggcaaatgattatgaggaacttagaagatataagtagcttttgtagtttttgctttgcggaaggaaggaaggctgtgactactccacttgccttggctggaggccatgtgcaggtgggtccttcagcgggcactgtgtggttcctggcttccaccccaccacatcatcactgtggcctctgactgcttgcttctcttcctcgttctgcactctcctccagctgagtttcacttagcaaaacagacgatgttcagtcttcacaggtgggagtcatgaaggtcaaacattacattccccaatttgatctaatcgaagacataccctccccaaatctaaaatatgtaacacactcaacggcctctgctttgttgattctgggaactacaccaaacacagttttgagacacttgctatttcctttccatctagagccactcctcactctcctcatattttcccctgaagctgttggatttatttctaagctctggaaccttgagtgggatgattcatattccaagtattttttccttttttatacatttcttaagttatatttttcaaggaatttgtccatatcatctaagctgtgcaatttattgacatcaagctgaccataatgtactctgaccattcttttgatgtctccaaaatctacactgttgcttccttttccattcctgatattagaaattagagttgtctcctttttccttgatcagttcagctaaagtttcattatctacatttgaaatccagactctgtcccttttccttgtcctcaaatgcaatttggtcagaagctggaggatttacaggactgggtgaagtcagcgttggttgaggaggggagggtgcagatggggtcaggagcagaactctgaaggtcaggaggctgataaggagggaattcagtgactcagaactgggtggatgcagcgctgaagtgtagaatagccatggttacacacccttccgcagttgttatagggatatttcctggtaatgtattgtaaaaggacaatttcccagtatattttgctcaagtctggagaactgaacatttacgctctacagctatgtattaaactcacaggcacttcagacaagttgagatgtatagtgtagatctctctctaatatggggaagaagcgacacaggacttgagactccagaaagggcagaagagctgcttcttcaaagctctgtctgtgtaaaccatagttacctctgagatgtcggaatgatggtgattcttagtttccagtgttttaccatggcatgcgttattatttaataagaaaaccaaatattttattattatgcatgctacaattttgtgtactaggaagtgtgctaaacagaaagaaaaataccaataaaatgagttgtaaatgagctgtaaataatataaatgaataaaatcaaatatataaaataaaataatacaaatgtgaggccacgatgaaaaacaatgtatgtatataaagcctaagcttctttttataagataccaaggccttccctttggtctcagatcagaccagaatagagccctcagtctgaacctcggggcattaatttttaagacttggttcttcgtttcaatgatgacatgcttgcttgggttacgcagtagacactgcacccgtgtaatctggagttgctagctgaccttcccctgagatgcacagtggaacaaggacagttcattcaaccttctgcagaatcctgagtagatgagagagccaagtggaaagatctgctgaatgtgaatctttaaaattgcaagctcctccaggttggccacatgcgcgtgaagggtagaccaccctctctctctctatgtgttcttgatttagccacttgcttttcaagattcctttgtgcctggatttaaaatgggaatttggtctgtcttataatttgtgaggtaagatctttaaagtgagagacaacactgaaagataaatgtatgaagagatgatgttatgcattcaaatttaacactcatcaagaacacattagactgtcccttagaaaaacccaccaagtgcagttgttttggcttctttcagggtctgggatccctttgtgagcctcatgacgcaaggacctttgcttcataaagaaggcacgaaatgtgactttagaaagctcatgatttccagaacccagagtggatcctggttcagaacgactgctccaagggccacacttctgcgcaggtttccccaagagtgcatttggaggaggacttgagggatgctccctggtgctcctctgtcaatgctttctttgttttattctgctttactctaggtcttctcagagctctcaatatggttacatgcatggggaatcttgtttctcaaacttgctcttggagcagagttgcagtgggggaagtgtggtctatgggcacagctcccactagggcctgcagcttcctggttcaagcagaagccttgcaaacatattcatctggaaaaagcatagcacagaggccccagttgcagagatgctccggaagcctgaggtatgcacagggctagtgagctaagaatattcctctgtcgccttttcaaggacaagggaagccagggtggagactgtgctgagctaaggtaaatataaaacaatcccagggcggtccctcagaggaaggcttagctccccggagccttgggtagagacgcttcctgcctgcctcggggagtcctcctgccaggaagaggcctcagactctgctatgtctggccctgtggggtgatcccacgtgctgggaaggagggaaaagcagggtggggtggggcaccctgacattgtttcagatctcctgcagtacgcctcactacatgataaagcaaaaccagactttgttttaaaataaaatttttattttagatttttttttctcttatggccttccccaaagacagatttaaaagaaattattttattatggaaaatttcctgcaaatgcatgcatcaacttccatgcactcgtcgctaaggtactcctgacccgtgtcctctgtaacatccagccctcctgcaaggccccactggactattttgaggcaaagccaagtatcatataattgcatccttcagcatgtattctaacagatcagggaatataaatccatactgtgataccatgagcatacaaaaatatcatcacttcatgttatgtagtaagtttcaattgagacttgccatttcctcattgtttcatgaatgctttttaacaggattttgtacaaacagaatccaaacaagttctgcatgttatatttaactgatatgccctaagtttctctctctttttttttttaaaaaaaaaaaaaacaacaactgaggcttaaaatgcctggcatactgtccaatgatttaattgtgtagcttcgtgaatgtttaataacgcctatctagagtcacattgcactgctcagatcaagatgtggacattcccaactccccacacctctggctccttccggtcatcacccacccaccagagggaatctgtgttctggcttccctcaacacaagccctttagcctgttctttctgaaaaaaaaaaaaaaaaaaaaaaaaaaaccaccaaaaaaaaactttaatgttagtttcaggggtacatgtgcaggtttgtcgtataggtaaattacatgtctatgtcttggggttttggtgtacagcttatgttgtcacctggcagataagcatggtactcagcaggtagtttttcaatcctcactctcctcccaccctccaccctcaaggggtcccaggtgtctattgtttccttctttgtgtccatgtgtactcaatgtttagctcccacttataagtgagaacatgtggtatttggttttctcttcctgtgttagttcacttaggataatgacctccagctccattcttgttgctgcaaagatcatgatctcgttctttttttctggctgtgaagtagtccacctctagcctgttcttaaaattcatagaatcttacatacagtgtgtgctctttcctgtctgatttcttttgctcagattcctgcctgtagactctgccatgattttgcaaatgttgcagttgtcatttttttttgtagtacttcattggtgaatgtggttttattttgctgtctgtattgatatggattgcttctatgctttggctagtactaataatgctgttatgaacatttctgcccacgttttctggtaacatagcactcccctatgaaatgtttcgacctcagggtaggtacactttagctttcggaaatgtccccaagtaattttccaaagtgtatgaattccacttgtcacacatccttatgaacactatgttatctttttgttaaagcccattttgatatagagtaaaaagattatccccttgattaaatttaaggtaggctcctctgagttctcctttctttaaattttttaattatactttaagttctagggtacatgtgcacaacgtgcaggtttgttacatatgtatacatgtgccatgctggtgtgctgcacacattaacttgtcatttacattaggtatatctcccaatgctattgggaaaactggctagccatatgtagaaagctgaaactggatcccttccttatgccttatacaaaagttaattcaaaggattaaagacttaaatgttaaacctaaaaccataaaaaccctagaagaaaacctaggcaatacaattcaggacataggcatgggcaaggacttcatgtctaaaacaccaaaagcaatggcaacaaaagccaaaattgacaaatgggatctaattaaactaaagagcttctgcacagcaaaagaaactaccatcagagtgaacaggcaacctacagaatgggagttctccttttaatagacctcaattttggtcaataaatccttgaacaagcacaaacagtttctaacagcacaagaccacatccccaagaggatgctagccctcatttaaattgccttcctgggaaaacttaaggctgttaaaataatttacagtttgtttcagccaatacctgaggatagggcttctgtcttccagccccagtctcaggaggatgagaccctaacactgaggattgtcagcctggtctcgtttacacgggctgatatttcatgaattttaacttttctgtatggcctgcccacttcctacttcttcattctccttttaaaatgccagtttacctgcgtacaaatggaagttgagttcccttcatggaggactcttttccctatttcactagttattactaaaatcggtccttacccctttacctagtgtcgggctgtttatctttgacagtaacaatagctcatcatggctttactttccattttcctgatggctgatgaggtggaacatcttttcacatgtatttgggtttcttcttctctgaggtatctattcaggttcctttgctcattttttttaagctgtctgtttcttaagtgtttttatataagtttttttttccctcctaaaatggcatgtgaagaacaaattatccacagaggtttagaatagaatagattagacatggacagtttaaaggtgaaagaatagagcctaagaacaatgaaaatgataaaagtgttggtctctttcgaggatttagaaagaatgggattatgcaatggatcttttgttatcttccaaaagaaatccatttcttgggaacaagatgagcataaaagtaatgaaacacaaatgacttcgtgacttatatgaatgatggaaaaagatgattattggaaagacattatactaatgtataataatagaaagcaaataaaaagagtaaaagtttggagaaggttatgagttctatgtaaaactcttcataaaatattctactctttctacactatgataaggctcacaaaaatacataacataaaaatagtcatattttatccagtgggttttaaatatttatggaagtcctcatgattctctttaataatgacatttttgtatataaaatgtcaagtgatcacttccttaagcttatgttttcttgggctgacatggcccattaccacatgttcctgctgcaatccatccctgtctccttttgaggctgacagcagggtcaagggctccctgaagggcttgttccattgggtgtgggacttcctgcccaagggccttgcctttcctgaaggaaaagtgaggctgtcccaaggggaaggaagaggagctcagagctagtagagaggcccactcccagggacatccatgcagggggtgaggcactgctgggatgcttctgatggggacagtccagccagcatgccattgcagccacagccatcccagggcagtgccagttgcaactcagtccccccagcagctgagtacagacgtcaccaattggtggcccaccagcagagaagggctgccaggggcttggccgtggagcctacagggcacctgctcagccagcctgctccagtcccccatgctggggtgggtgcttcagagctttcagagcagattgaagggtgtggaaagaacagaagtgagataagaaaggagaaagtgttaaggacccgaaagaaaagtcatgtgaacacaaagagagtccacagcaatgtgtcccatccaacaatcctttgaccatggggaagcagcctttcctttggggtcatggctggtgtgctgggtccagggctgccttgctgagatctgctgaagcagaacacaggtgccagcagagcacggggtttgggatcagataggctctttactgggccatgggaccctaggcaagatttttttgtttaaatctttctttatttcaatagctttgggggtacaagtggtttttgcttacatggatgaattgtatagtgaggaagtctgagggtgatgaggcacccatcacctgagtagtatatattgtacccaatatatagtatttatccctcactccctcccaccttttctcttctgagtcttcaaagtccgttacaccactgtatacttctgtgtactcaaagcttagctcccacttgtggtgagaacatgtggtatttgattttccattccagagttacttcacttagagtaatgaaggcaagatgtttaatgtgtctgcagatcagcttctgtttgtgctgtgctcatgagctgaatcactgcaggctgaatcccagctgcccagctataaatgtttgcctcaaagaaggtgctcagaccaggtgcggtggctcaagcctgtaatcccagcactttgggaggctgaggtgggtggatcatgaggtcaggagattgagaccatcctggccaacatggtgaaacaccgtctctactaaaaatacaaaaattagctgggggtggtggtgaatgcctgtaatcccagctacttgggaggctgaggcaggaaaatcacttgaacctgggaggcggaggttgcaataaggcaagatcatgccactgcactccagcctgggcaacagagagactctgtctcaaaaaaaaaatgaaataaaataaaaaaagatgctcggtgaataggagactcctttgagcgctcagtatgtaggttgggcagcagctaaagaatgatgcagatgccttctttatggaggattttgttttggagaagcccctctcacctgcctgacttccctgtggcagaggtcaagtccagttctcagagctcacacctctgtccagtcagcctggcagcccctcccagaggcacatcagggcaggaggtgagggtcagtcctggtagatctggaaccagtactggcctctcgaaagcaccagtagacagtgatacctgcctggggcttcacatcaacaaagataagtgggtaaacaatactggataaaatggatgagccactatcttttttaaaatatgatttttttttttgagatagagtttcactgtttgttgcccaagctggagtgcagtggctcgatctctgctaactgcaaactctgcctcctgggttcaagcaattctcctgtctcagcctccatagtagctgggattacaggtgccaaccaccacacccagctaatttttgtatttttagtagagatggggtttcaccatgttggccaggctggtcttgaattcctgacctcaggtgatccgcccgcctcagacttccaaaatgctgggattacaggcatgagtcattgcaccgggtcattttaaatttgatttttaaaacatctgtgtcatcactaaattcatttggcaatccagctggtggggctatttggtaatttttcctccatgatgtgttagagctatactcataagtttaccatcttttcttgtatcttttatcttactctttttcctgttccagggactatgtaaataagaaaacagcattcacacctttttattgcttacctgaattagtttaatgaccattcctttatttcattgctcatcattgttttatcccacaatccttactgaatactcccatggcccatgtgctgggcttagaactgtggactcacaacatgcaggtccctaaaatcaaggagcttgtgttcatgtgaaggagatcatcaaaccaagcatcatattaggattggggtgtgctctagggcattccctgcagcagttacagtgaagctaggaacactcaatgctcagcaatagaagagctgaatcagttgtgggctagttatactctaccctactaagaagcagttaaaatgagtggagaggatttagatatagtgacagaggaagactgagacacacagcataatatactcttcagtaagaatatatcctgttcatgtgtgtgtatgtgcatttcacatgtatgtcttagtctgtttgtgctgctataacagaataccaccaactaggtaacttatacccagaaatttattggctcacagttctggaggctgggcagtccaacataaaggtgctggttggtttggccatttggattccaagatggcaccttgaacgctgagttctgcagtggggaggaagtctttgtcttcacttggcaaatggcaaaaggagccaaaacttgccctttaataatagcattaatcccatcgataagggcagtgccttcatgacctaatcatctcttaaaggtcacatctctaatattatgataacagcaatttactttcaacatatgagttttggagaaggcaaacattcaaacatagcaatgtatataagcatcttgcaaaaatgtttatttttaatgctgtatatattgtttggaaacactttttatgtaaaaatagatacagatgcaggtataggtgtaggtaagcacagataaaagttctggaagggaaggcttgtttgggttaaaggaagaggattgggattaggtttgttttcagtggggaatttagctgtggcaaatgtttaaatatttgcagggagaatgcatgcttgtattattattattattattattattattattattattattattattttgggatggtatttcgctcttgtcccccagactggagtgcattggcacaatctcggctcactgcaacctccgtctcttgggttcaagcagttctcctgcctcagactcctgagtagccaggattacagccatgtgccaccacggccgactaatttttgtttttttagtagagatggggtttcaccatattggccaggctggtcacaacgttttgaccttaggtgatccacccgcctcggcctcccaaagcactgggattataggcgtgagccactgtgcccggcctcatgcttgtattatttatgtaactaaaaataaattttaattatatatttccattttgggaaaacaaaaaagaattaaagagacagactattttaagaacatcagcgtcactaactgaataaggaaattgtacagattttgaagattttatgtgatttcttggttgttgtgtaacttcccattcacatactcattcattcattcattcattcagttttatcaatctcccttctgcaaaatatttgaagttgcttacaaaatcatatacatatagaacttcataatgtaccatcaaaataaaactatattaaaattatatctatgttatacctgtatgtgtgtgtgtatgtgtgtgtgtgtatatgtatatacgttatacacatacatagaaggcagatgtcattgggcgctgactgaatcctgagtctgggtttcctgatagttagaagacaaccttcttactgatactaccagaatgaacacatacacaatatggtgtgctttttccaaaacactgaaaacctgttgttcattccctgaaaggaaacaataccttctcctctcactgcacaaaactggatatcctagaaaattcagtgccaatcaaaaccatgacaaacactttgtttttcttagggagtcagatttagattcttaggtgaaataattatcattaattttttacctacaaaaacatgcagtgggcacctcaaaagtgtgtggagcaggcgggcatgtttgttgacatgggagcaccttgtgcattgaagtgcatgtgacattccatgtgattcactctctaaagccagtatcaccccaatcactttacaaccaaaaacacatctagaaatttccaaaacaccccctggagaggagttttcaccccctgatttcaccaagaaccattgattagggcatgcagtagcattaactcagtgccttagattgaagtttcccagaagctgatgggagcatggagctgtgtgcagaggtttatatagagcgtgattccaggaagcaggggtggagggagaatgtcttttcatggtcaccactgtgagccactggggcttgatttcactgggatctcccaagagtaatgcagaaagtcgccagaatctgatgggaggcaggagcatttacctactaactcctggccccaagcgattgagagttaccttaggataagtttgtcacaattttgagctcacctgtgcacagagcctggctcattgagacactgtcagcatgaagtgagtccaagtccaaacataattgtgcactctggcagcagggggcggagagtatgtggctccaggaacaaggctcagtggcaccacttctagggagaggcatgatgattatctaagaaggcctcagatgtactggccaaccagcttaaaaccagctcagggagtctttggagaggccatgtagttgggcaaatgtgaaaacccagaacattttagatctgaatcaatacaaggccaagactgtagccactggggtaaatcctagccatgccagtccatttaatgaatcacctttctactctccaccttcacggtaagcaggcctttgtttcctgtccccttgtccatcctttgttcctggagagaaattcattccccaaaatattcccagggcaacatcaacacttgtaccagaatactacttctaacctcccagttctgggaggattcagctggtctgtggttgtaaaggtcaaggtgtggcttgatcttttctctcaactcaactgaagtctgagatgcagaagccaggctgttcacatttacagtagaaactgttcttgtacccacagcacagcctcaagccctggccgtcacagcaagttcctgattctcctgctgtgaagctgctgtgagagtgaaaaggctgtggggcatctccaggctgagtgtgagacgatgctcccacagacttacttcctgccagccacaccttggggagaaacaaaaggatgcaatgccaaggcaagggaggctttgtgggtggcgatctcttagtttgctcagggtttgtgctcagtgctcagcagatgaggaagttgatggctgtctccaggccccatctgtccaaattgtgcgcatcctcagagtagggagctggcactcacttacctccagactcccaaatctcccagttaaactcagtacacttctcatgggcaccatcttagctccagtccccttgaagcagaccctgggagtattctggaaagtgatgctagggctctggagagatggaggactggaaagaggaggggaagaggccaggagcccatgtaaggaagccttatgatctcacacactgtaggaagctgggctcagatccccagggacccaccaaaaactggagagaacctcccactggagacatgcaggaggagactattcatccactggtcccttggccatgggccaagggttgcctggtggtggtgaggtgggtattagttccctcacagggcagccaccgggatggcaggtggctccacagtcatgcagttggttcttagcagagccgatgtgcaccggaattctcctgcatggccacaaagttgtagctgtgcatttgctctttaatgagtgcatggctcatgctaggtttataggacatgtgattctcatcacatcaatttctacagaaaagaagatgcaggtggcctgccttttcagctgtatcctctgtaatgcaacaaggagggtgacagggaggtgctggagacactctgaagttccctatagtctcctgctgccagaagccacagcagccttagtcacaggaagagtcaaaggtcagggtgtgtggtccatgggcacttcctgctgctcagtcctctgctcctctcagggctgtcccatgcctgggaagtcccctcacattaaccctgaggcaagcaggaacttccttgattctcagcatcctttcaaccagaaaaggggctcaggttcttcttccacccccatctcccatatgccaaaatttaacttgtcctgagacccattccaccttttctttgcgagaaacacagccagagtagatcataattaaagagcgtggcctggtgtggcagtattagccataatttctggcctagaaacagacactacagggaagcaagtcatgaaggagggtttaatgaaggggtatggagagctgtgggtggggtgtggggagtcatggagaagtgtgtaatgaagaggtatagagagctgtgggcagggtgtaggaagtcatagagaagagtgtaatgaggaggtgtagagagctgtgggcggggtgtggggattcatggaggagagtgtaattaagaggcatagagagctgtgcgcagggtgtggaaagtcatggaggagggtctactgaagagatatagagagttgtgggcggggtgtggggagtcatggaggagactctaatgaagaggtattgagatgggcggggtgtggggaagtcactgaggtgcagtaccctagcggccagcagcagtggggagctgctactgcccccagcagaacagggggactcccaatctctgagagagaaaccagtattaggaagagggactttctgatgggagctgcagccttcagtggaggaacagatacatgggcaaagggacggagcctggggaatccctccagtcgtataacttttatttctgtttgtctgccccttcctgggcttccttaaggtctgccttaccctttaccgaacccccatctgttttcagtagctagagtggatttttgttgtctgcttctggaaattctgatggagatactgtgtttacatgtttacatacattattcaatttatttcatgcaacaaacccagtgaagtgaaaaccccctaaacgctcacatgcactctgccaatgaagatgtgggagctcagaaagggtaagtgcagcagacactgtcagtggccgggctaaatcccctccattatcagttccacaggctaatcaatagctgcctagggagaacacctctgcctgagggcattactgttctggctgcaggatgatggtggacctgagttcagggcaggccagaggtgctggaaacgcagtgtccaggaagcagccttcaaccaatggcagctgggagttggtagataaatgtcctagtttcctagctgctgtgaagagaatctctctggggtgtagtctgcagttgtttccagaatttccctgtgagctgagtcctgattgctcccagtggtaaagagctcaatgatacctcccatcttaactttctaccctttcgcgtctctcctcaactccccactccactgagttttcttaggatcacttctcaaagaacgacttgtacttaatccttacctaggggaggtgggaaaccaaatctgagacatcaagtttcttacccaagattgcctatcaagtgttggggagtttcaagctctccaacacttgataaaatacaactaaatgatactgagtacatgtgtgtaatgcatggtacaagggcagaaattcatagttctagagtgttggatttcacgtggaaatatggtttgtggaattttgtatctcagagtgccagtgggagacttgtgcttgtggattccctaagcaggcaaaggcagagaggaattaacgagagagatgatggatgagaggggagtgatcatgagggcaagcctcatggtggaagaggaagatggcatcacactgggaaaactgtggtagagtagggtatctagacaacaaatggccagtcctctgggcactgggttaagcgtttgaaaaaagaaaaagaaacagggaaacacacaaaaaagcctatacaccttctgttaatattatgcgtgactatttatacacatgttatgggttcctctgaaagtaggaaaacatcacgtatgggtggcaacttcacaacagcagttacccaacaggaagaaagaaaggaaaagagaacagatagtttggagcgactctgcatggatgggatctgggttaatcgtcaatttgtgttgctgctgttttgtatcattaaactttatatcttttagtagctgaatctttattagaaaccattgggatttttgagtgaatgctgaacatgttgagaacaggtgaattctatagggaaaaaacaaacaaacacaaaataccagcaacacaatcctgcaatcttgttttgtctgtagggtggagcaagggctttaaatcctgccagcaacaaaatcaattaccaatctttttttaaaaattattgcaaaatagaaataatgtaaaatttgccatttaactatttttaagtgtacagttcagtgacattaggtacatttacaatgttgtgtaaccatcaccacgatccatctccagaactttctcatcttctaagacagagtacagagtactctgtacctattaaacaactccccattctcccttccttcagttcctggaatccaccgttctactttctgtctctatgaagttgactaccctcagtatcatatatatggaatcatacaatatttgtcttcacctattatttttgacttatgtaaaatttcagtattttacagacttttttggttttatttgtgaactacaaataatcctttattaggatgtattcataacacgttggtgttgtaataaaccttaaaaaatagcagtttggaaataaaaggtatatagattaggatggaagaaataaaactgtctttttctgcagatgatatgattgcctatatagaaaatctgaaagaatcaacagaataactgaaactttataataattttatagcaagcatgcaggatacaaggttagtatacaaaagtcaatcactttcatatatgccagcaacctatgaatgagtggaatttaaaacgaaaacacattaccatttgcattagcagccccaaattgaaatatttagatacagatctaacaaagtatgtagaaggtttatatgaggaaaatgacaaaactttgataaaaaggaatcaaaagactagacaaataaaaagttattcgatgtttatagacaggacaactcaatattttcaaaatgtcagttctttaccacttgactggtagattcagtgcaatcccaatcaaaatcccagcaagttatttttgttacataaactgattctaagttagtttttttttgacctctgaactttttattggcctccttctccccaaaagtcccctgcttctgctggctttatgtctcagaactttggtgtcattggtctcagacaccactttgccatccactatttggtgggtggtggtcttttggatggtttacatggagctgctgctgtccagggcatcaccaatattgaagtcctcgccatcttccagcaggcggcagtaggtggagatctcagcctccagcttgaccttgatgttcagcagggcctcctactcctgggcctggcgctgtccctctgcccgggtctgtaccagctctgacttcaggtgcagcaggatcccattgagctgctccatctaaagggtgtagggggcctccacctccctcaggctgttctccaagctagccttcagatttcttatggaatccaggttgatctccaatgactggactgtatgtctcagctctgtgagcatcatctcagcagctccaacctcggtggactgtgtggtgaccactgtggtgctctccttaatctgctgagaccagtacttgtccagctcatctcagttcttctgagccagctcgtcatattgggcctggatgtctgccatgatctagttgaggtcctgagatttgggggcatctacctccatggtcaacccagagttggtaatctgggcttgtaggccttttatttcctctttgtggttcttcttcatgaagagcagctcctccttgagagccttgatctgtctccagctgcagccgagtgacattcgtgtcatcaatgaccttgcagagcccatggaggtagctctctacagattggagcatggccagctctgtctcatacttgactctaaagtcatcagcagcaagatgggcattgtcaatctgcagaacgatgtgggcattgtccacagtatttgcaaagatctgagccctcaggtcctctatggtcttgaagtaatgcccccagtctctgacctggggtcccttcttctccaattgctcacagattttgctctccagcctctggttcttggtctccaggctcctcactctgtccaggtaggagatcaggtggtcattcaggctttgcctggtctccttcttgttctggatgccttccattcctgccagactctcagccatccccacagccagagctctggacaccatgccgcccccgaagctggtggagtgggacatggagatcagggaaccagaggccccagcaccttcatagacgctggccttgctgctgaccagccgggcaccatagcttggcatctggacagagcccagggaccagtagttggtggagaaggtggagcgagtggtgaagctcatgctgtccgaggaggagagcgagaggacaggactcaggctttgctgaccatcttgattttacgtttatatggaaaagcaaaagaccgagaatagccaactcaacattgaaagagaagaaagtcagaatacttacactaaccaacttcagggcttactgaaagctacagtaatcaagatggtgaggtattgatgaaagaataaacaaatagttcaaagtaatagaacagagagctaaggtatagacccacattaatatagtcaattactctttgatataggatcaaaggggatgcaatggagaaatgttgtcttttccataaatggtgctgaaacaactggacatttctgtgtaaaaaaaatgaatctagatcaaatcttacatccttcacaaaaattaatccaatagagcatagacctaaatataaaatgcagaactattaacctcccagcaaataacaggagaaaatcaatgacttggatatggcaatataacgccagaggcaaaacccataaaaaataataagcttgattaattaaaattaaaagtttctgcttggtaaaacacacagttaagaaaatcggggggcagttccaagatggccgaataggaacagctccagtctacatctcccagcatgagtgatgcagaagatgggtgatttctgcattttcaactgaggtactgggttcatctcactggggttcgtcggacagtgggggcaggagagtgggtgcagcccactgaatgtgagctgaagcaggatgaggcatcacctcaccccggaagcacaaggggtcagggaattccttttcctaacaaagggaaggggtgacagatggcacctggaaaatagggtcactcccaccctaatactgtgcttttccaatggtcttagcaaatggcacaccaggaaattatatcccatgcctggctcagagggtcccatgcccacagagcctcgcttattgctagtacagcagtctgagattgaactgcaaggtggcagcgaggctgggggaggggcacctgccattgctgaggcttgagtaggtaaacaaagctcgaactgggtggagcctaccactgctcaaggaggcctgcctgcctctgtagactcaccactaggggcagggcagagccaaacaaaaggcaacagaaacctctgcagacttaaacgtccctgtctgacagctttgaagagagtagtggttctcccagcacagagtttgagatctgagaatgaacagactgccgcaagtgggtccctgacctccgagtagcctaactgggagggaccccccagtaggggcagactgatacctcacatggctgggtacccctctgagacgaagcttccagaggaacaatcaggcaggaacatttgctgctcagcaatattcgctgttgtgcaacctccgctgctgatacccaggcaaacaaggtctggagtggacctccagcaaactccaacagacctgcagctgaggattctgactgttagaaggaaaactaacaaacagaaaggacatccacaccaaaaccccatctgtatgtcaccatcatcaaagaccaaaggtagataaaaccacaaagatggggaaaaaacagagcagaaaagctgaaaattctaaaaatcagagcatctctccccttcaaaaggaatacagctcctcgccagcaatgggacaaagctggatggagaatgactttgacgacttgagagaagaaggcttcagacgatcaaactcctctgagctaaaggaggaagtttgaacccaatgcaaagaagctaaaaaccttgaaaaaagattaggcgaatggctaactagaataactagtgtagagaagtccttaaatgacctgatggagctgaaaaccatggcatgagactacatgaagaatgcacaagcttcagtagccaattccatcaactggaagaaagggtatcagagatggaagaacaaatgaatgaaatgaagtgagaagagaagtttagagaaaaagggtaaaaagaaatgaacaaagcctccaagaaatatgggactatgtgaaaagaccaaatctatgtctgattggtgtacctgaaagtgatggggagaatggaaccaagttggaaaacactctgcaggatattatccaggagaacttctccaacctagcaaggcaggccaacattcaaattccagaaatacagagaacaccacaaagatactcctcgagaagagcacctccaagacacataattctcagattcaccaaagttgaaatgaaggaaaaaatgttaagggcagccagagagaaaggtcgggttactcacaaagggaaacccatcagactaacagcgaatctctctgcagaaactctgcaagccagaaggaagtgggggacaatattcaacattcttaaagaaaagaattttcaacccagaatttcatgtccagccaaactaagcttcataagtgaaggagaaataaaatcctttacagacaagcaaatgctgagagattttgtcatcaccaggcctgccctaaaagagcccccgaaggaagcactaaacatggaaaggaacaaccagtaccagtcactgcaaaaacatgccaaattgtaaagaacatcgatgctcagaagaaactgcatcaactatcgagcaaaataaacagctaacatcataaaaacaagctcaaattcacacataacaatattaaccttaaatgtaaatgggataaatgctccaattgaaagacacagactggcaaattgggtaaagagtcaagacccatcagtgtgatgtattcaggagacccatctcatgtgcagagacacacatagactcaaaataaagcgatggaggaatatctaccaagcaaataaaaaaaaagcaggggtttcaatcctagtctctgataaaactgactttaaaccaacaaagatcaaaagagacaaagaaggccattacataatggtaaagggatcaattcaacaagaagagctaactgtcttaaatatatatgcacccaatacaggtgcactcagattcataaagcaagtccttagagatctacaaagagacttagactcccacacaataataatgggagactttaacaccccactgtcaacattagacagatcaatgagacagaaagttaacaaggatatccaggaattgaactcagctctgcacccagtggacgtaacagacatctatagaactctccaccccaaatcaacagcatatacattcttctcagcaccacatcacacttattccaaaattgaccacatagttggaagtaaagcactcctcagcaaaagtaaaagaatacaaattacaacaaactgtctctcagaccacaatgcaattaaactagaactcaggattaagaaactcactcaaaactgctcaactacatggcaactgaacaacctgctcctgaatgactactgggtacataacgaaatgaaggcagaaataaagatgttctttgaaacccatgagaacaaagacaccacataccagaatctctgggacacatttaaggcagtgtgtagagggaaacttatagcactaaatgcccacacgagaaagcaggaaagatctaaaattgacaccctaacatcaaaattaaaagaactacagaagcaagagcaaacaaattcaaaagctagcagaaggcaagaaataactaagatcagagcagaaatgaaggagatagagacacaaaaaacccttcaaaaaataaatgaattcaggagctggttttttgaaaagatcaacaaaactgatagaccactagcaagactaataaagaataaaagagagaagaatcaaatagacacaataaaaaatgataaaggggatatcatcaccaatcccacagaaatacaaactaccatcagagaatactataaacacctccacgcaaataaactagaaaatctagaagaaatggataaattcctggacacatacactctcccaagactaaatcaggaagaagttgagtctctgaatagaccagtaacaggctctgaaattgagacaataattaatagcttaccaaccaaaaaaagtccaggaccagatggattcacagccgaattctaccagaggtacaaggaggagctggtaccattccttctgaaactattccaatcaatagaaaaagagggaatcctcctaactcattttatgaggccagcatcatcctgataccaaagcctggcagagacacaaccaaaaaagagaattttagaccaatatccttgatgaacattgatgcaaaaatcctcaataaaatactggcaaacagaatccagcagcacatcaaaaagcttatccaccatgatcaagtgggcttcatccctgggatgcaaggttggctcaacatatgcaaatcaataatcgtaattcagcatataaacagaaccacagacaaaaatcacatgattatctcaatagacacagaaaaggcctttgacaaaattcaacagcccttcatgttaaaaactctcaataaattaggtattgatgggacatatctcaaaataataagagctatttatgctaaacccacagccaatatcttactgaatgggcaaaaactagaagcattccctttgaaaactggcacaagactcaccactcctattcaacatagtgttggaaattctctccagggcaatcaggcaggagaaggaaataaagcgtattccactaggaaaagaggaagtcaaattgtccctgtttgcagatgacatgattgtatatttagaaaaccccatcatctcagccccaaatctccttaagctgataagctacttcagcaaagtctcaggatacacaatcaatgtgcaaaaatcacaagcattcttatacacaaataacagacaaacagagagccaaatcatgagtgaactcccattcacaattgcttcaaagagaataaaatacctaggaatccaacttccaagggatgtgaaggtcctcttcaaggagaactacaaaccactgctcaacgaaataaaagaggacacaaacaaatggaagaacattccatgctcatggataggaagaatcagtgttgtgaaaatggccatactgcccaaggtaatttatagattcaatgccatcactatcaagctatcaatgactttcttcacagaattggaaaaaactactttaaagttcatatggaaccaaaaaagagcccacatagccaagacaatcctaagcaaaaagaacaaagctggaggcatcacgctacctgacttcaaactatactacaaggctacagtaaccgaaacagcatggtactggtaccaaaatagagatatagaccaatggaacagaacagagccctcagaaataataccgcacatctacaaccatctgatctttgacaaacctgacaaaaacaagaaatggggaaaggattccctatttaaaaaatggtgctgggaaaactggctagccatacgtagaaagctgaaactagattccttccttacaccttatacaaaaattaattcaaggtggattaaagacttaaatgttagacctaaaaccataaaaaccctagaagaaaacctaggcattaccattcaggacataggcatgggcaaagacttcatgactaaaacaccaaaagcaatggcaacaaaagccaaaattgacaaatgggatctaattaaactaaagagcttctgcacagcagaagaaactaccatcagagtgaacaagcaacctatagaatgggagaaaatttttgcaatctactcatctgacaaaggggtaatatccagcatctacaatgaactcaagcaaatttacaagaaaagaacaaacaaccccatcacaaagtgggccaaggatatgaacagacacttctcaaaagaagacatttatgtagccaagagacccgtgaaaaaatgctcatcatcactggccatcagagatatgcaattcaaaaccacaatgagataccatctcacaccagttagaatggcaatcattaaaagtcaggaaacaacaggtgctggagaggatgtggagaaataggaacagttttacactgttgttgggactgtaaactagttcaaccattgtggaagacagtgtggcgattcctcaaggatctagaactagaaataccacttgacccagccatcccattactgggtatatacccaaaggattataaatcatgctgctataaaggcacatgcccacgtatgtttattgcggcactattcacaatagcaaagacttggaaccaacccaaatgaccatcaatgatagactagattaagaaaatgtggcacatatacaccacggaatactatgaagccataacaaaaggatgagttcatgtgctttgtagggacatggatgaagctggaaaccaacattctcagcaatctatcacaagaacaaaaaaccaaacaccgcatgttctcactcataggtgggaattgaacaatgagaacacttggacacaggaaggggaacatcatacaccagggcctgccatggggtggggggaggggggagggaaagcattagaagatatacccaatgtaaatgaagagttaatgggtgcagcacaccaatgtggcacatgtatacatatgtaacaaacctgtacgtcgtgcacatgtaccccagaacttaaggtataataataaaaaaaaaaaaagaaaatgaagacaagctgcagattgagagagaatatatgcaaaggatacatgtgataaaggattgttatccaaaacatacaaagaactcttaaacttaacactaaggaaacaaacaactcatttaaaaaatatgccaaagactgaaacagacactttgacaaagatatgcagatgacaaacaaggatatgaaaagatactgcacatcatacgtcattagggaactgtaaataagacaataatgagacatcactattcattagaataaaaatccaaaacactgacaccaccaaatatggcgaggatgttgagcaacagaaactctcattcattgctgctgagaatgcagaatggtacaactactttgcaagatggtttggtgattacttacaaaactaaacatactcaacatggaattcagcagttgtgatcctaggtatttgcccaaatgagttgaaaacttatgtctacactaaaaccttcacacagatgtttatggaagctttattcataatggccaaaactttgaaggaaccaagatgtccttcagcaagtgaatggataaatagattgtgaaacattcagacaatggaataatatttagcacttaaaaaatgagctattgagctgtgaaaagacatgaaggaaccttaagtgtatatagctaagtgaaagaagccaatctgaaagggctacatagtgaatgattccaactacatgacattctgaaaaaggtaaaactatgtggataatgaaaagatcaatgattgccaggggttgaggagagggagggatgaatagatggagcacagataatttttagggcagtgaaaactgatctgtagaatactacagtgttggatatatgtctattgaatacaaatctattgaatatacagcaccaagagtgaaccccaatgtaaactatggactttgggtgataatgatgtatcagtgtaggttcctggattgtaacaaatgtactgctttggtgggggatgttgatagtggaagagactgcgcagatgtgggagtgaggggtgtataggaactctgtacttgtctattcatttttcagtgaatcttaaacttctctaaaaataaagtttgttaaaaaaataatgtctcagccctctcattttaagtatagggcaactgctggctaataactcagcctcatactgtactgagaaactgaaagcaactcctcagttggtaatagcctcaaggtaccacccatatatcggctggcatctgggccaagcctttttttcttcttccgctcctgggatagtttcatggaagccagccccttctgacatggcctgaaccacatctattctcatagcctcaggacctccctcctttagttgttccctttctcctgaaacaatgccctcttttctttactagaccattcccatcagcaggtaaacatattctagtatcttccatgcagaaaagatttttcctggtctcatatttctcccgagccagcgctggttcttcactccctatgttatagcttctcaagggttccatctgttcatactcacctctcattctcttgtcagctcactccatcactccattaagactctacatggaggccgggtgcagtggctcacacctgtaatcctggcactttgggaggctgaggcagttggaccacctaaggccaggagttcaagaccagcctgatcaacatggtgaaaccatgtctctactaaaaaaatacaaataaaataaaaaaaaaattagtcggacaaagcagtggcacttgcctgtaatcccagctactcaggaggctgaggcaggagaattggttgaacccgggaggcagaggttgtggtgagccaagatcgcaccactgcactacagcatgggcaacagagccagattccatctcgaaaaaaaaaaaaaagactcttcatagacaccaagatctttgtgtttctaaattcaacagccactttctattattccacataatcttagcaacagttgagcaaccactcagcaactactgccctcttcctgtaatactttctttccttggtagatcccctacctccttgagtactttttccttatactctcctctactcatcctccaaatgctgaagtgctctttcctgggcaccctttccttctttatctgcaaactctctgagtgacaatatttaggcctcagacttcaaatcctctacatgaaaagactccaaaatttccacccgctcctctcacctaaacccataaacccaaatcttcatggatgtctatagggaacatgtctgtaatggcccaaacagaactccaggtgtattcccccaatctacctagaatatttatcatttcatttctgcaaacaatatccaaaattgattcattttttgctaaagccaaaagtctatgcaacctctctgaattctcttcttctttcacaccagtaagtcttcctttccttacatatatagatatcctgaatccttcacttctgtgaattctcactaccttagtccaagcttctagaacactggaagagtctgtagtctcctaaggcatatactgattcagtcattgctctgtatgttttaatcccacagagacacaaggagattttttaaaagcatggatcacattgctttcctacttcagactttccaacaaccatgtcccattgcttagaatgcagtccaagcacttatctgggttcacttactctacttggtctcacccttgtcctcccttctgatcttgtctccaagttgcagcttcagcagcctacaccaccacaagcccgtgcttgtttctaggcttagcactagttatttcctcaccaaggaatgccattgaacttgatctttgcagagtaggcttcttcttgttgctcagatcttagattaaatgtaaagtcacccaagaggaaatctgttcagagtggctgcccaagcatggccattttgctccatctaaagtttctggatagtctttttcatcccctcattctctctctctctctctcacacacacacacacacacacacacacacacacacactttttccattactgttggccttcttcactgctgtatttttgatgctgagaaacctgtctggcacacagtgtgtgctcaataaatgtttctgactgaatagatagaagatacagtggaatgacttgccccaaattgctcagcgagtggcaggaaaaatgaaagagtctacaacccttgactctttgcacattatgccatccccaaaacaggaagattgttagtactattgctttttctgaaatattatttggcctttaaaaagagggaaattcagtcatttgtgacaatgtagatgaagctggaggacattgtgctaagtgaaataagccaggcacagaaagacaaagtctacgtgatctcacttacatgcagaatctaaaaatgtcgaactcaaagcaatagagagtagaatggtggctaccagaggttgggggaaggaatgaggagatattgatcaaagggtgcaaagtttccattagaaggaaaatatgattttggagtctattgcacagcatggtaacaatagttaataataaagtatatttttaaataatgaaaagaatacatttccagtgccataactcttaaaactcactgacaaactcaatttcaagtggtaacttagattttgatgttaaaagaagtgcaagaccatatcacaaacctagcaagtctagacttgcatttgcaggtgactaagatttcagatgattcccccacgttagagatcaaataaatcttgataacatgcctgtttgtccataaaaacttagttttacatactaacactgccttttgtgtatatttaaacagaacaaatggtaatttattatgttctccagaaactgattttgcaacattgctaaactagcagactggagagatgctcacaattctcagatgatatgagtgtttctctgcatgggcatcagagctgccactgcttgacattccaagaacttcccagctacaggttcatcaccttctcctcccaggaaagacatgtgagattctgcacagagacaggaatgtcgtaagtataacttgctctgtgcttttcctttatttgaggcaggaattcattccctggctgaatgccatgggttacttattctgggtattacattgcactttattagatacaaataaaacttttatgaaagtgtttataggagtgaatgctggaagacccacttatatctcacaggtgccaaagagcctgaagtcatgccagtggtggagtgctgattggaacagactgggtttggatgacatctctactcatctgtaatggaagctgtgtcaaagtaaaccttcctcaggcacctgtagtctgccttggttgcttagatttgtttgtaattgtttttatcctttcacaaattgtgcaatactgcttatcaagcaatgattagtaaatgaacctgtcattattttatctcactgagtaatatcaggagttataaaaagaaaatatttcccaagccttacccccacgactctagtatctacaattcactggccttaacaccagcctacagtcctaaaatggtatctgatacttgttcatcagcttcttcttttattttttttttcagataggaaaaattttgaaaaactctggtggcctttgggtgatgaagttaatgataattgccaccttttttcatgaagtttcttgaactttgacaactttaggaacaataatactgatattgataatatgtcatcttgttctcatgttctgtgattctgaaggtgaatatatatattattttcatttgaccagtgaggaaaataaggatgaggacataatttaaacctggtcaattcacaggcagggacaaggtgggactcacagtcaattctctgacttccagtcagaaatcttgaccctaagcgtttttcgtacatgaataggttagatctattaatgagtaggtaaggtgagatgtggggtctatcctggccttttaggtgcaggttgagttatcaaatctatgagaaaaaccacatccactagaagtcagagaatctgaatgtgagttccacccctgtccatcttatttaccaggtataaatcatgttctcattcttattttccctcagaagcaagaactgaccaccatgtacatcagctggaacctttctggaatccacacagtgtaataatccttaggaaaagctacctgggattcagctgttacaatcagaaggccacgaacactcaactggaacctttcataatcccagtaaaaggaaagattcagctcttgtcctgattgcagactttgtgttggtattttaaaatctgtatcggtgaataatttcaaattttaaatctacctacatagttgacaaagactttggactgtgatgattttaatgtgtatctatgaattatttaatactctttccttcgaagggtagaatacattttcacttttcttaagtgtggggtaaacttaatgactcatttgtaaaaaataaattgaagtatgcatagaggtgtcacttctaatgctaggtcataaaagacgttttgttttctgccctgttctgtctttctctttgatcattcaggctgggggatgccagctgccatattgtgaagaccctcaagcatccctgtggagaggtccccatggcacagaaatggactctcagcccaaaagccaacaaagaaccaaggcctcaagccagcagccatgggaatgggaatgtgccatcttggaagccaatcctgcagccccagtcaagccttcagatgacagtagccccagccaatatcttcactggatcttactgagagactatgtgccagcatgaccctactaaacaactctcaaatttctgaccctcagaaattgtgtgagataataattgttttttgttttaatatgctaagctttaggtttgtttgttactccaaattagacaactaattcagaatgcaatatatacactcagccaggtcaactcctctgcttcttgatgcctggggagagtggagagagtgatggatccccattattattgcacccagggtacactggtctgggtttagaatgtcttgtgctttttcaaccttctgttcccacatttctcagtagtatgtatattaaactctcttcagtaacccactttgagtctgccattttttcctgttaggttcccacctgaagtggctgccatgtaacatctacacaaactccagcaagtggtggtggtatcacctgtgctgtgaatacctcccagtgcaaccatgcctatcacattggatgatgccattcagagctgctagtgtcagcaaagccaggctccagtgtcaccagggtggtttgcctgcatcacaggttcttcgccgacatcaccaatggctgtgctgcccaggctttgctctctccagtgctcctttgatatttgcgcgccccccacctcctcctaggactcagaagtaagtcatgtgagatgtgcgggaaaggagccaagagaagggcaattagaatcaccctgaagcaaatttgtctttccaggatgtcctgcccagggctttactggggtctcacatgaatagctcttggcagtgccccagtgcactagaaatgcttataaattcctgaatcccaatgtgaacagagtttgggtcagtctggacccttgcttcatacacttagaagtcaactgaagtgaaagatttaatttgactatattttgtgattcataagtcattgcttctgtaaagattttgaatctgatactcagaggctaaaatacaaagaatttgacaccatcctgggatcttgagtaggatgtacatagaagacatgataacaggctgggcactgtggctcacgcctgtaatcccagcactttgggaggccgaggcaggtggatcaggaggtcaggagatccagaccatcctggctaacacggtgaaaccctgtttctactaaaaatacaaaaagttagccgggcgtggtggtgggcacctgtagtcccagttactgagactacagtctcaggctgaggcaggagaatggtatgaacccgggaggcggagtttgcagtgagccgagattgtgccactgcactccagcctgggggacagagcaagactacgtctcaaaaaaataaaaaatagacatgataaccagaaatgtcatttgattctggaatccaagaccccaccaggagctgtgatgcggcccgggaggctgctgagagtgccccttctgaagtcaggtgccaccatagcctgtctcgccctgagcgtccctcaactccacttgtctcctccagccctccacctcttgaagcaagtggaaaacccttttctatttttggaaatgcttacacaaatgtgtgaaagagtaaaggattttgtctcaatcctggcaagtcttcgtctttccgatgcctatgaggatgataaaaaagtttcgggaatagatgaatttgtttacagagaaagccctaaagaccggggtggttttagataacatttcctagggctattcaaagaccccaggagcttctctccctttatttttcttggtttcatttctgaaaaatgaaggctgtctttaaatcccccaatactgtcagagacactaaatccaaagaacattgctgcattctttgctttgctgtaaggctgagagattttttgtctcaagatcttttgttgcttctttattaaactggttaaagtataaaacgagagagaggggagagattccttgaacttcagtagctgtggcttcaattgtagctcatgttgcttgtttttagttattgacagaaagccttagttagaatataccaaatctattctttgaatgtattatgctgatgtaggtcactgattatctccatgccaggcaccatgagaatttttccttctcatctggctcctcgaccttcctgagccttcagctggttgcccgcctgcacctccagacctgagcttcaccaccttgtcccctctccttttttgggggttgaggtgtctgctgagcattccttcttggttctattgactgaatctcacgcatcttgcatgtcagggcctttcaagctctatggatgctgtacttcctattgcattgcctttctcttcttgaccatagcccacatcatcattgctacacctgcattcctaatgggtaacccacaaaacagcttcccaatgcactatgggatactctaggcccatgggatagctcctagagccccctggttggtcagagctgacctcattatcctgctcaataaactgattgtgtggaggtgagttttaggactcaagggcctcagctacaccttccatcctagtccttgaccacttgctcagtggagaccactcctttaccccaaccaaccacacctgctattgtcttatctcctaaagctgactgctctcttgggctcccctggactgggtttttgtatagattctgttgcatgcaccatgaagaattacagttcccctgtcacccaagctcaatccactcagataccctgcagttctactccaaccccgggactcagatggagcccaggggctcagactgcaccacgtgatgcagtgtttgacttcccagtggcttcctgaaggaaccaggtagcataacttggaggagtgagacagttaatacccgtggaaaggaactagaacagtgagagaaaggtggaaggaaggagtcatgaaatgaacttctcccactttctgccctcaaaggccatcttgagatgccccatacaatagctggaatataatgaataccagaaatgatttattgtgtatctgacatttaaatttaactgggcactctgtatttttatttgctaaatctggcagctctgactagggatcaatatctgcgaagggtagagggaggaagcagaatttggccaaggaagaacctggtcataatgcagggctggcaaagtcctggccaccccatagggagctctggatccacagtcccccatcagggttgtcagaattaggtcaaaaaagtctgcccttatgcccctgccttgctccatcaccctgggtatggtgtgcaaagcacaccagggatggtgtacaaaccacactaggaatggcctgactgggccaggcagctctcagcagctcatgccaacttagaagagccagtggcatccgatggccacactctgcagctgggagcaagtcctaacttgaaggggggtcttggcagcagatctatgcacccaccatggctagtctctactttgttttctcctcaaatttctttcctattcagtcatttaaataaaggagagcccttgctctgattctgtgccttgcacaccatgagtcccccgcttctgtgctccctatggacatgcttcgagtgctccccttctttctccaagttattcgtttgcctgtgatgtcttccctgccagaggcttaagctcttccacaggctgtactgtgtctttttcatttagaaaaaaaatatgttgaacactaatcatgaatcaggcactggggcactactgtgaacaacagcaactcattcaggcccaccttgagcttagaattagcggcaaggtgcactcagtttagacaggtagatgtggtattatgatgggtgtcttagcctggtttcctccagaagcagaccctgaaacaagaatttgttgcattaagtttgtttagaagatgattaaggaaaccctggtaagtgaatgaggaggtgaaaggaaagggaaggcagccagcacaggtgtgttatccagcagtgaccactgagggagggcacctggagccccagataccataagtcatgagagtaatcacaccaaggaacaacggagctgagaaacttgtccaccatgcctgccagctattgaggagatctgctgtgtgtgtgtatgcggggcagttactaattttctagcacttccagtttggagtacatgggctctggccacaagaaagtcttcagatttattagccatcaggctgctgtgaacggcactcagaagccctggagaactatgagtggaccattaaccactaacgctacaactgagaagaccaggacagggtggaggagtgcccaggcataacccaacctaacgcagattaacaggaggagtagaaggaaagggagtaggttccaagagaagatgcaacatgtgagaaggctcagaggcaagacattgctggcctgtctaagggaagggaaggagttcaagcaacggcaacatcgattgctgggcagcactgtgggtggggccagggagttgagggaaacagattctgggaggctttgagagccgcttcatgtgtctctgaggccaggctctcacagccatctggagtccttggccgactcagcttaagagaagtctgtttgctaaagggcctcagacagtgttgctgtgtcatgggatctatagcactactacctcaaattgaacattctaaatagggcttacaaaaataaagcatttctcccttaatatgagcaacaccactgtcattatcacagagaagcccactttgccccaaacccctgcacttaattcgaaggtaaaattcaggcccaggagcacccctccaaactcctctgggcatgttgaaatgcgccctccagcatgcagtttctcccctacaacgaggctcatgaggtcaaatgagtatcagcactgcattgatcctacacaccaaaggcaaatattttaacataaagaaaaggacatacggagtgagaaaaacagtctgcaacagtgctgggttctggagggcaatgggaactgggccagctctgaccccaaaatccttaccaccctaactagaattccaaaatcattcccaagtagcaatcaaagtcaccgtcaaccttaaagaatttagactgtagctcggggtcaatggtaaagaatctacagtgctgagaaaaatgttctgcttgtttatactcaagaagtttattgaagtcattgggcatggtgatgatgattttttaacgaaaactacagaaatttctctctgtcatatgcagctatgtaaggagggacttggattctttttttgctcaagggtccatcttgaagtccatggattgtcctgcctctgcattgtgtaggtttgtctcagctccctggtttgtaagcttgcatgttctctccaccaagggagcctctgtccaggcagtttggtgtgggtagaaatacctgccccagagcgaaagtcagaggacctgggttcggggtcttccttggttggtttcttaggcctcagacatttatttcaccctgggaaagtcacttggcctttctaaggcccagttttcacatctttaaaaaagggcatgaaataagtcttcttttgctttgctgttacatatttgctcttgtataggtatgtatgtggtatagtgcttgtaacaaggcagtgtgggatgggaaatagcatggactttgaaacctgagagatttccttcaaatcctactgctgagctgtgggtaagtcactgagactctttcaggttcagtttgtccccctgtcatggagaactgttgtgaagatcaaataagataatagatgcaaagtcatcaggtcaagtgctcataaacagccacatgaatctattttggggtaaatggtgatgcatgctgtggttgctcagcaagtgtgcatgcatttatttgcctagacactcatggatgaacaccagacaccttctcagtcagattcttagttgcagacagcagtgtaccctctagtaaatctgagtggaaagggattcagtaaaaggtattgggatgctcaaagacctctggaaagtcatgtatttaggtgcggatgcaactcagctgtgaacagagcagccagagatgcaaggaaacctccgaacaacctcagcagaaatgccatctcctgccactcagcacacatgatgttagggcctggacaactgaagctccagcacagctaccccatcccagtgtacagggcctccaccttctgttgctgtaggctgtagcaggtcacacagggagacttagtgtcagggaatgctgagaagtgaggtgttcatattttgagcctccatggcactggaaggtgctagaatggggttggaatgggagccgcatgagctcatctgcagtgtaagccagcagttctgtcatccttccaccctgaatgagtcctggagaagggcaaacatctaggttcacacacttatggtagaatgttctacttagaattgcctgcaacatggatctttattagtttttaaaaataatgatacgcctataatcccagcactttgggaggctgaggcaggcagatcacttgagttcaggagttcaaaaccagcctggccaacatggtgaaaacccctctctactaaaaatgcaaaaattaaccaggcatggtggtgtacgccggtagtaccagctactcagaaggctgaggcaggagaatcacttgaacccggaaaatggaggttgcagtgagcactccagcctgggcaacagagcaggattccatctcaacaacaacaacaacaaataacataaatagtgataatgatttcaggtctgaatgtggacatagaataattttgcttgaaattacttttcctcctagatactcctcctagattcctctatttattttcaaaatagtagggaattttgttttgagtattaacctaattctcttggggaaagttgtgtacctagagaaaggaaaggatttccaaatcactgccagtttggggaaatacctaaaaaggacaagtgcctttggttcaggccagtactttggccacagagccagcggtcattttgagaaagatattctcccctctctgccccagaaggtccctcagaagcagagcttcaggaggatttctggaaatgtgtttggctagatggcgttgccaggaaaagtcagcaggacaaaagcaagtgggactgcagagggaaggaggataagcaggggaaaatccctgcagggaagcagcagctccaacagcagggagcttgcaagtcgcaccttagaactgctctccagcagcctgaggatggcctctgaccgggatacacaagtgctggccactgcatgtgcgaacacccgagagccgatgtgtatgaaggtgactaggtatccatgagcatctgacagcatcaaaataacctgcatccacatgtaatgggtgtgtctgtgtgcatggaggaaaggagtaaccttgggaataacttccactctaaaggacccaccatgtgccaggcaccatggaaacaagacaaatacacatgcttcctctaatggtttcaatagccccatgaaccaagggccagttttacacatggggaaactgaggatggggaggcaaaacaatttgtccaccaccagcaggaaacactccaacactagtaagtgctggagtttggatttgaacaggagtctatctgaaaatatatattctctcttaactattaaaatctcctaatagatgatagacaggtagacagacagacagacacatataatacttcctttgtatatgtgttgatatctatatctacatgtgcataaacagatgaacattgattttgagccttagcacctgtgttgacattgattaagtaaaaaccatagggaaataaacaccatcccttcttgccttcaagtttattttattttatttttatatttatttatttatttatttatttatttttgagatggagtcctgctctgtggcccaggctggagtgcagtggcatgatctcggctcactgcaagctgcgcctcccaggttcacgccattctcctgcctcagcctcccgagtagctgggactacaggcacccgccacgatgcctggctaattttgtgtatttttagtagagatggggtttcaccatgttagccaggatggtctcgatctcctgacctcgtgatccgcctgcctcggcctcccaaagtgctgggattacaggcgtgagccaccacgcccggccgccttcaaatttattgagatccttttctcctcgttccacattagcaagcgttgcaaaggcttttagtcacacaaaggcagataaagcaagccccagaatcctgctccacactctgagccccacggtggtgggaaatcctgcaggctcctggaatgtgcctggaggagtgggctgaggtccaatcaggcagcgctcagcctccacacccatgacagagtagaggtcctgcggtcacgggccaaggccatcagggtgctggggtggtggtccactctgactgcccatctgagcgcctcacccttcatggtgccacataggggagtcacagcacagcaaggcttggagcacaatgaaaaagctttgcacctgtgggcccccttgggaagaccatctcaaaagtcagtggtggattccctctgcagccccttgcccagccacagaacagaagcaaggtggctctcgacaagtgggaaaattgagtaatgcccctttccctggcttcaggggtttgcttgtgtacatgcgtgtgcatgtacatgtatattagggcgtctgtgtgtgcctgtgtgcatatgttgtgtggtggattgacatgtacttagctgcaggtgttcaggcatgccctcacatataaataggatgcctaagcaagtgccacagcccagcctggtatttccctgtacctggtgcactggcacttagaatatttcttgactgatagattgagcttgccaataatccacttggggtgatttatgctggcatttccctgtgatctcaaggtgagtagacataaaatctgagtggcttatacaagtaaacatggccttcagaggagatgggctgacaggtagctggagggcctgaaaaatcacaccagctcaggccagatgaaggagaggtccaatttccccaggtcctttatgtttttgtcaaatggggatccatcttcaagtgatgttggggcagggttctccaaagaagggcagcgagggaaggaagagggacaggaaggagctgaacaggagcaggttcgagctgcagtctggctttaccctgatccctgggggagctttggaacaaactgcaccacagtctcaccttgcgaggggctggcctttgtaccctgagccagtcactgtttattgggggtgggtggatgggctgtaatctcctaagatgcttccatgatccaatgacaattttccaaaatgggggtagctcgaagctgagacagctgacttccctggcagctgaaggctgtgcacactggccaataagggatctgagtggggtctgaccagtatcagagtgatttgcaggtaaggattaagccaagggtagtcattaaaactaatgacaattgttttggtgtaactaactttatgtcatctccaaataacctagtaatttttattaattgcaaaagctaagaacttcctgagtaaattatctcctgctccatccactgtcaccaacaatatagaagtagttttgacagtatttgtctatcaacttccaatttactgacaggagaagcatgattaattaagacatctgaattccatcattaaaaaaatgaggtttcttattttaagaaggcattcagggcaagaggtgagttaagactatgtgtagcattagcattctaaattctccttttacattataagttttgcacttcttttgtgaaatttattccaaaatattttattcatttttatactagtataaatgcaattattttttaaatttgatttttggattgtctattgcaagtttctagaaatacaactgagttttatgtattgatggtgaagcctgtgcccttgctgaatagaattgaatcttgaagctagtcatctgagttcttctgggcctctctatctgatgccataatgagaggcatagggaaaaggtgttggaaggcagggcagtgggaggggcaggggctgcctaatgacaatgtccaaatgctaaaagaaagtacgtactcagctagacatcacactggaggttacttttctcattgaaagaccatcagcattaactatgccgcaaggcatgcagacaatgagaaaaaactcagagcctgctggccagggaaagcaatgctttcagaaaacagaaagccagatgatggataccaaagtgccctggaagtggagataccagtgtcaggggtgggggtggtggagaaatcctctctgagcttatgggaggaaaggaaaatctccctagaaatcactagttgaggactctgtcattcgagtaactaacagacagaaaactcacagatagtaacaaaaagtgttcagaactagggaagttagtattcaattcacatcattctgggccacaaaagtttatgcccatagagtagaataagactgggtttgaatggaggcagttccacggctgcactcggatggtgttggttccttacttgttccccaggagtccagacatgatgagaaggacccacagtattgtacttggtattttgttgttgtttcagggaagacaagtgaggccatgctgtgaagaccacctcaagatttcagggcttcaaacaacaaaggctgtttcttgctcacaatgtatgtccaccacaggtcagcatgaggtggggggtttctgcccatcataaggtactcaaggacctaagctgatagaggtttcatctcttagaaggacagaggcttcatctcaacagatgtttctgcggagatagggaagaggcacagttagtcatgtgctagtccttaaagctgccaaccaggagagacatgtgatgttctgctcacatttcaatcagtaaaggaagcacgtggtcttctctaatgcaaaaagggcgttcaaattctacctccctatgtgcccagaaggaaatccagagtatttgtgactagctccaatgactatcagtatccactctcctgctcactaaatatttgattccatttctttctatatttgttttccaaacgaaacaacttagacattccatggatatattgaaggtgacacaagagaaccaagaattccaaaggggagcagtggccagggcagacctattttttctatgtcctggttttcactttgctgccattcacagggacgatcaggaactcgggtaccattcacagccagaggagccacagcccgcagctgtcaatcacttgtggttaaggccctgcaggggtttggtctctagaaattccctgtagtcgagttttcagtttgaaaaattgtgcagaacatcttccaactcttcttaaagccgctaaacaaaattagcccggtctcacggtgcaaagagagatgggaagccctggaagaagagcaatcccgcccatctgtaaacctctggagtatatgggtttaaagggttgagcccagggatctgggacccacccaggcaacagagccaggttggctctgggtgtgaactgagcttcgcagagggggctggctgctcctgcttctcggttccctccacctctctctctgccccttgggggtcaggatgggtggagaaggccatgccaaagattgagagctctgcctttcccatctcaagtggtcctgggctcactgctcacatgccaacggacacccgcctcaggcgagaagctctgatgactctgatattgttttccagcttttccaactcacctttctgctgaaggacacaaggctgctcctccaaagccctctggcagaacagtcttctgggttaggtctcaggtttgctggatggctttggttggtataaccagattcatgaatggacaggcccagatgcctgccctgtgtgaccaggttatgatccacaagcagaaaaaacaaagatccttttagcctcctgaaatcccttgaatgtgaaaacacagtcatcactctgggcaatcagagaggccagagccctgttttttgtgtggctgctacatgggatttcagaggggtgcgaagcctttatttccaggctcaatttgatctgctgcttgaagagctcaacaaaatgagtccaagtgttagaaaaattcaaacccagttgaaggatgagggtggtttctcataaagcagtgagttgtcctggctccttaaattggctgagaacaaggaagggctgttcagccaaatttttctttcgcagttcataaaaacttgaccatgcataataaaagcttacatttacatagcacgcttgagtttccacagtgctcatgggtttattctttaaatgttgtggttcctaaagacagttttacaaatgaggaaactcaaggttaagaagggtaagtgattttcccaaagttacaaagccaatgagggtcaggctggggtccagagcctctgagaatcctctcgtcacaccaccatggggctgggtcatttccctggggaaggatttaaaatatatatatatatacacatattttaactttaagttctgagatacatgtgcagaatgtacaggtttgttacataggtatacatgtgccatggtagtttgctgaacctatcaacctgtcttctaggctttaagccctgcatgcattaggtatttgtcctaatgctctccctccccttgccccccaccccccaacaggcccccgtgtatgatgttcccctccctgtgttcatgtgttgtaattgctcaactcccacttatgagtaagaatatgtggtgtttggttttttgttcctgtgttaatttgataagaatgatggcttccagcttcatctatgtccctgcaaaggacatgagctcattttttttttttttttaattcgaagatgcttgaagcttgttttcatccatacctgcttggcattttgagtttacagagcttttctgcagacacttgagggtttctgtttttgtttttagattcagggggtgcatgtgcaggtgtgttacatgggtgtattgtataatgctggaatttgggcttccattgaacccatcacccaaatagtgaacatggtgcccaataggcagttgtggtaggatattaggtggagacccatgagcgtccaaatatgggaagagctgacccccatcctccatgctataaggaaagtggtaaactttccatgaaggacaagttaggaaggtccacacactttctctgcaactgacggctaccttcaacctttacatataggaaacatggtgagaggggatgggacaaggggattcagctcatcagtgtcagctccactacatggttccgttgtaaggattaaatgaggtgatgctatgtaaaagctgaagaaatactggtatcttccacatacctcttggggtcaaagaggagagatggacaccaagcgaccaccagggctgttggctccattcataggactgattttgctttagccactcctcttaaatccctaccaatggctttcctatgtacccctgtcactgctaggcctgcagctctgcagtgaacttctgctgcaagaatgaggtctcggatgggtctttcctgagaaaccctttcctgagaaatattttctctgggaataggactcccagagggactgggttggctggaatcaaagcaagcgaaagtagttcattctcccccttggtgccacaccacactctcctccttctgccctggcaagccgttctttcccatctgggaagccctggcttggtgggaagcaggagcattaataagcctcagtcaataaccagtcccatggtttcagctggttgtgcagagctcccaggcctgtcagtgacagagcagctgaaagagaggcccacacaggccacagtcagcagtggggatccaggggcagcccactgccaaaggctggtggcctccttcatggtttccacccataggggtgagctgaagggaggctgtactctagaaccttctagaaagccaaggtcacagttgccctggccagccagcctcaacttcaaagaattcacaagcagggggcattcgctctgggacgcagcatcatccaaagaaaatgcagctttcctctcatgcagtgtctgtgaagatgtcgtgttgtcagagcattgttcaccaggtcctctgaccctaacacacgctggaatgccagcctctctcccctccccagatgcttagccaaagaagccactttgcatggaggcaggaaagaaagaaggcaaaggacatagctggtttcactctgtggtctcaagttcaaaacagttaccctagcgcagggccacctggtaaaaatatgaccccagccacatgtaccattttaaaatatctaatagccacatttaacaaagggaaaatggtaaaatttacttcattgatagattttacttaacctgttgtatcaaaagtattatcatttcagctcttaattataaaacaaatgttagtgaaatattttgcattcttttctcatattgtgtcttgaagctgccttggagcactgtttccttttacctcaaaggtgatcgccaaccccctgtaataatcaggactgaatattaaaacataatataggaaaatatatattatgtttgtataaggtttactatgcctcaaagaaccttcacattctttttttttttttttttttttttttttaagatggagttttggagtgcaatggtgcgatctcggctcaccctaacctctgcctgccaggttggttcaagtgattctcctgcctcagcctcctgagtagctaggattataagcaggcaccaccatgcctggctaattttgtatttttagtagagacgaggtttctccattttgtctaggctggtctcgaactctcgacctcaggtgatccgcccgcctctgcctcccaaagtgctgggattacaggcatgagccactgtgcctggccagaatcttcacattctttaacccatttgatttcatctgagccagtttgactcttttacacatttgacagtgcaaactgcagcacaagagaactcaagtgtcaccaggcagttggtagtggagtttggtctcctgattcctggtgtagcagatttcccaccggaaccacagggcaagacacagtgccaggccccgagttcacctggatggggaaagggaaagtgagaagtcagggtggtcaggaaagctgcaagagatggggctgacctatctgcaaacataaacaaccacaggactgtacacgttgagagggtgaatggtatctcaataaagtggttaaagagagagagacagagacaaagaaacagagacagagagtccgagagaaagagagagagacatagagacagagagagacacagagagagggagacatagggagaaacagagagagagatatagagacagagagacacacagagacagaaagagagagacacagagacagagagaaacatagagacagagacagagagacatagagacagagagagacagagagagagagagacagagacagagagagacagagagagagacatagagacagagacagagagagacatagagacagagagagacacagagacagagacagagagagacatagagacagaggcagagagagacacagagacagagagagagagagacgtagaggcagagagagacagagcactggggcaagatgagctcccaccgccaccccaggaaggggcagtctgtgtcagcttcatttcctgggaagtagaaatgttaaccaagggaaatggatgttttctgcaggcaaagagaaggtcccaaaatcctcaaattaatcatgcccaaagtttgcattatataaaagcaacacctaacatgtcagtggatgtacaaaggcacctggaaggcatagacaggcccaggcctgtagagtgtgccccacaggctgagagaggccacatggccagggaagggtggggcaagacaaggcctcatgagggcctgggcaggtctgcctggctcacagctgtgtcctggggtcacccccggctgggcacttatgacacactcagaatgtggagtgtgtatcaaggggacagcgttccatgtggaaagggtttgatcccacaggggcagggagcagaaatatcttcaagttggaccaccatactttaatgttaacagacatcagtgccagagagtcctgttctaattctctgactttccctgtcctccctaatcaggggaagtggagagatggcagactccagattctgggagccctgcattcctctgtgctcaggacccagcactcaggctggcaccactgtctatttgtgtctgtctctctgtctgtctgtcttttgttgtagcggttctttcgttttaagtgaactggtttccccaatgtgagcaagaagaaatcctacatgaaaaacataaacgtcttagcgtggccagatgagacccctacacatcccaaggagaggccgggtgtgtcagctcaactcaccaggaagtgcctggagtgatctctgtgcctttattcaaatgccagagagttcaccggcaaagcataactttgagagaatttctgaatcattcccaacaagtgagaaagtgcaatttaatagaaaaaattccacaaatggagagaatgctgctgagcctgtaacctcagacagtgtcatgcccaggcccccatctctggccccacgcccgtgtgcccacagcctgcctgccatgggaaccccccaaatacctttttatcctgttacaccctgggttggggaagggagtggtggtggactctcctggatagactcagtaccaaaccctcttgacccaattcaaagggtgggacgggatcggaagcaggaaaagagccatgggtcaggcagcccctggatagataggtagggagggcctgagtgcctactgccccgtgctgggcggttccaggaaattccaggctggccaacctaactggctgctattttaagagctgtgctgaggcaaacctagagagaaactcagctcagtaaaagcaagacaattgtatcagagaaggcaaatcaggccactcgaactgtcccacaccttctgggatgaagccaggggcacaggactaggctgtgactgtgatgcccctttgacaactgaccaatagttcatggtccccctagagcctgggccaagccctcagctccctgaagtacccacttaacagaaggaggaggctgtatgtcccttgggatggactgtagacaccagtgccccctttagatggtcagcagtgcctcccaacccaacccatcatatatatatatatatatatatatattttttttttttttttttttagatggaatctcactctgttacccgggctggagtgcaatgacgccatctcagctcactgcaacctccgcctcccaggttcaagcgattctcctgcctcaagcgattctcctgcctcaccatcccaagtacctgggactacaggcacacactaccactcccagctaatttttgtatttttagttgagacagggtttcaccatgttggccaggatggtctcgatctcctgacctcatgatccgcccacctcagcctctcaaagtgttgggattaaaagcgtgagccaccgtgcccagccccaacccatcatcttaataccatgactctgtagagcagaagttcccaaatgaggtggccccactcgggttcactttcctgacaagtccaggatgattgctctgatctcagggccatggtcacctgctgtccacttgcagacctggacggcgtgaggcctgggtcttcatctggtgatccggtgtcactcagcatcactcatgcctcctggtggctcctcccttaaccatcagatgaggtgtgggggtgagcaatgtcctgtgaccttgcagtctctgggtgcccagcttgcctgtgtgcctgtgaaaggctgcaggaagcaggggctggaggctcagaggtacacgttctgggctcagttcccctttgattcagaggtttcaggccctccgcaggaccagggatacccagatccctttagtacatgagagctcggtgtgttgtggaagctgaaggaagctgccctgggctctgtttaggggctggatcaggcactgtgtatgttagaacaagagggcaacttaacatgtgactcaggaagcacagccgctccctgtccacccccaccatcacagggctggttaggaggaggtgctgagatgctgtcttggagttggtataggacatgggtgaagatctggctacggccacttccagccactgtccctggcgaagccatgcagccttcctgggcttttgggttagcatctttgaaatggacgtgactatatcaggcgggcgtgagcgggctgcctcctgtttgactggtgctctcctgacgcacaagagggaagctctcagtggggctcccagtcgttggcactccatggggtgggctttgccagagcatgagaggaagacaccacagttcaaagtggattctcggtcccagtcccaggctcccacgatgtggtcagagatagggatgaggtcagcagagaggtcatgattttcagagttggtgaggcaagcactgagaaactaagttcaacgagaacagtgatggattttaaaaataaaaggaaaaaaaaagaaagaacagcaaaagaaaggccggctaatatcctgagaagatttgccatgattaaggaaaggatttaggctgtagaaaagttgttgacagatgttctgccctcaggactatatttggaaaaagatacaagtgaaacaaaagaactgttgggttcaataatgttgtaagttgcagatcattttaaaaaggaaaatggatttcgcatgtgcctggggtgggaggaggggcggcagaaatgcaagtagttattgtgtttcagtaacgttcatgtacttttcctctgactttcttggggtgctggctgtccagggcctctgccttgatggtggacttaatgatgtctcaaaaaggaggcctggccccaggctgcctaaatatgacatgtttgtttggtctcagacaactcactgttctcaaacttcagttacactgaacatgagaccctttaagggacatggatgtggcatgatgtggtgggaacaagactgattggaaaagttggggagagtttgtttcaagtcctggtgaggtgggataaatgaagccctctgtcttcaatctgggagagagctgagaaaatataatatttctctggaactgggacacccatgttgggtggttaagaaatacatccaggtaatctggggaccaaatttctaagacaataatgtcacggttcctcttcaaaagaagcagaaagagctgttgcacccagagaaaaaaatactagcattggaggggtggctttcgtcttggggagcaatggaaaacaggctgtggctccaaaagtcaggaactaagtgaagattagagcacccagcctcttctcttcctaaggccagacaccacccgtatcccatgtggacggcaaagcctgagccaggcatgtgctattgaccagacgccacctgaaatccaagtagatggcaaagcaccagcgagggtgtgctattggccagacaccacccaaaacccatatgaacagcaaagccccagccaagcatgtgctattgaccagacaccacctgaaacccatgtgaatggcaacatccaagcaaggtgtgtgctagtgaccagataccacctgaaacctatggagatggcaaagccccagagagggtgtgctattgaccaggcacctcctgaaacccatgtggacagcaaaaccccagagacagtgtgctaaccagataccaactgaaacccgggtgggtggcaaagccctagctaggcatgtgctcttggccctggccaaatttgaggagcctgctttggaagccacaggaaaagactgaggaaggagtgacccggagcttcccaatggaagcaggtggaatcccaaatgagccagcttgaaatggaaggagtaggcacattcaggacagggaaagaatgaaagagaatgacagaaactgagggggaacgggacaggcaaagaggaagagagctctgccttgtcctgtctcctctgcttgtgacttggacaaggcagagcgcttttcaggaggttgcatggtcccaccccaggtcctgttcgatgatagctcctaacttgtcaggatgatgtgactgacataggactatgtgccaggtactggtctgtaggaagctttattttatacaacatcttatttaactccatttaattttcacaacagactgcaagaatggcattatccctatttttacagatgaggagactgggggtcagagcagttaaaacactcatttgaggccacacagagagttagtggaagaactgcatgttgagctttcatctttgtgatccaaacctcctcattccaccacgccaagcccttttctccaggagggcagggatacctcctctccctgctcttggaggggtctttcccagtaccttgaatggccaactcagattggcttccacagtgcaaacaggttggtgtaaggcactggtcatgccatggatgagatggtgcatatctatgacattcctccatggagaagggggatctctgtcccctcccctcaaatctggtgggcctcattgagtcacttgtggtgtaaatgatggttagcagcttacaaggacaggggatacactctgaagcttcagccttggtttctgagaccactgactatttggacatgcctctgggacacttccgtgtggaagccacctccacgctgcgaggagcccagccctttggagaggcacctgcgggtgtgcagcactctggtcagcaaccacagatgagctccagccaacaaccagcatcacctgccagccaggtgaaccacctcggacatccagcctcgaggagcctccaggggactgaagcctgagtacttgagagattctaagcgagaacttcccagtcaaacccttcccaaatccctgacctgcaaattacaagcaaaagaaaatagctgttttaagttgctaagtttgaggatattccttgcatagcaataagtaaccataatggtgcttctgtgaatatgggaagctctcctagggtcccgatgagctgcatgtaggtcgctggggggtgatgtgctgaaggaacagcagaggtatccagacttgcctgctctggatagactaaggaatctatgacagaccaggaatcccagatagactaaggaatttatgacaatgggaccccgtgtgcagtctccaactatattaatcagtaaacttcaaataagagaatctgtgagcaaacttttcatttgtgagtggcaaagctatctcagacagaacaaaaaagggcagtgggagcaggagcagagatgagctatgaagctgtccagatggatttccaaagcacaggaagaccccagacggcagggggaatggaggacagaaaagcaaatactgttcgtgccggcatgaatggcaccatgacattttgctgctattgccgactctgcttctcattttcttggccatcttgcttcaggatttgagctcccctgggacagggttatgttagtcattgtccgcgaggtggacaaatgagtctctaccttctgaaaataagcttacaatttatggagctgccttggagctagagttcttgcttccagccactgtaagtatgcagagattggggtgtgcaaatcaatatgctatgtctggtacccaaacacggtttagcataaatctcatttaaaactcaacataagctgtgttttgaagatcacattcctaaaagctcgtaattcataacttcagattaaaggcttaaaatacaacttgcctgtcctccagctgctggaaaaaaaaaaaaaaaaacagtgatgtccttctgtgcaggtacaacctcagtagaattttttttggctccaagttgtgtaagaatccaaactgtgaaaacaaactcaggcccccaggcctcagctagagaagagaggaatcccaggtatgcaaaagtctgtatgggatgcccctcttagtaggtcagggaaagctgttcgttcccagaaagaagcttggggaaggaagacaagagacaaggggaagagggaaagaggtttttgcttttcagcttgtagattccatcaggcccccatccagctcgggacagagcccagtaatgctgagtaaacagcctgactcagggcccactttttagtcagttccgtgtttatttgcttgttttttatttgtacagagaagagaatggtttgataaaagggaggagagcaaagataaagacttgtgacatttgtagataaacaaccaataaaggaaaggtgaaaaatgatgattccataggttaagggaaagagagaaattgattatatttgaaataatatttgaagataaagtccatctgtgtgtgaagaagcatgggaaatacaaatatgaacttgcattttgccagattatgctattttaggatgctagtgggacctgaatgggactttcttttcaagaactagagcttaggtgttcagatcctgaaggtggtttcttttaggggaaaactttgatggagaagggctgggtttgggaggtgattaagaacagaatgaatgcatagatcatactctagaccatggtcagcaaatccatgagcagtcacaggcaacgtacaaacccacaggctgctttcccactgcaacagcagaggagagaggttaccacaaggactacatggcatgtaaagcctaaaatatttactatctggccttttagaggaaaaatttgacaactcttcatctagaaagtcatgaacacactcacctgggtgccacttaccctgtgattgtccaataattttgcttggttgagttttacaagattactatggtgttagtcctttttgcattgctataaaggaatacctaagtctgggtaatttataaagaaaagaggtttatttggctcacagttctgcctgctgtacacaaagcatagaaactgcatctgcctctggtcaggacttcaagaagcctttactcatggtgggaggtgaatgaggagcaggcatgtcccatggcaagagacggagaaagggagaagggaggaaggtgccaggctctttaaacaactaactcccacatgaactaatagggaacttgctcattactgcagggagggcaccaagccattcatgaaggatccacccccatgacctaaacacctcccactaggccccacctccaacaatggggatcatattttagcatgagatttgaaggggccaatcatccaaaccatatcaactagcgtggcaacaaatgtaaatatatatatacacacattcagacagacacacacatacagacagacaccaacagacacagattcacacacttacataaatacagacacacacacatacacaaacatatacacatgtacacctgcatacttacctacatacaacataataaagaacaagaaaaaataaaaatggctacatcagggagtatagagagtaggaatgagtcagggttcctcaagcctatgctgacacaccctcctgtgtcccctgagcactcactgccccatgcactctacagacatttttactgcatgtgagtgaaatcccccattcaagggttgcctctgggcacaggaatgtgcttggttctcatgtggggcagcaaagacatccctagaatgtgcacttaatcaagggtaatgggagttagtggacctctggcccagcttcctcactcctggggtggggcagcactgtggacagggaagtcccagagggactaagcttcagtagcccacagatgcctgaacatgtgtcatttatggccttcctcctctgtctcaccccattccccattgttactctctggggtcacccccaaaataagctgctgcactcacagtcttgctccacactgcactcgcagcctgtcacagctccagcatactctgaccttggcagtgggatattttgctccctgtctccctttgcttgataaaatgtcctgtattttttcatatgagaatagtaataggatgaatttaataaagagttgttgataatatctgattttcttacttgttacccaaaaccaaggaacacatacaaaaaaaaaaaaaagtaaatcaagagtgaggactgagcctaatctcctatgccatacaaaaagattctaagtcaagtcaggctttgggcattagaggctctttgtttaagtgagcaaaggaagaggaactgacattctgcattttcatctcctcaactgggagccattggtatatgtcctacagctagggagtcatttgctctaccagctgcaaacttcacacttgcctataccaagcatttttttaaggagtgtacatagggctagacacagcttgggatgaggagggagcatgagtggctctgagggaggagtctctgggaggaggtcactaaacacactgatgaacagtggttttttccccagcccttaagttaccaagaagaagggtaacatttgcaaaagagaggagctggaggaataaagtgagaacaaccttcagaaaagaaggtgctcaggggaagcaggtgctttgaatagagtatgaaagaatgaagacattgaggatttcccctcatccataagatgggggaggcttgttgcatgagatacccaggggtgggggaggtggagaaagatgccttgaagacgtggcatcaggtttcctcattggacatttcttcatgccttttttggagatagaatactggcttgaatgaactgaatggacccgttatttcacttaatatgctattttgtatgtttgtaataaggatctctgttgcagaaaattgagtctattgtgcaaagtaggtcatcctctccctgttgtagttttggatctgctagtggcatctgtggtcacctgtgagtctcatgtttcactaaataaagagttgtgaatcacagcaactcgggaggctgagcgctgccggagctaggctgtaagaccagaaccttcagtcagctctctgaggatgggggtagactcacgtatgttccacttggatgccagggatctggaaagactggagaggaagcagttcacccaggcagagcaaacaatcatgctggcattctctacttggagggagagttaatagaggccaccagtgcggcatacagacatgggtgtcttgccagttcatttccaggtctagcttctgggtctagcccagggtccagctgctccacaagaagctatcacccaaacgggttgtgactgcaatgggtgatgtaacttggtgtggtgggggtagaggagaatgagatgaacaatgtccaaagataaaggatttcaaagagtaagatttcttcccaggaagcaggtccaaggagaaaaatctgaatccatggtgtccaatgccaaaggccctaagtccccctgtccccaaaaggacaagaagatgttagacacagtacggaagggaagactttgctccgagttagatgttgagagaacctcatcattaatctgaaaaaggaacaccaccaacaacaaaacaattaacaccaaattagagttgggggagaaaacaaacataccaaattaaaaaaaacagtgggaagtgcaaatgattcctgatctctgcagaggcatttcttatggattgagaaatggccagcttcctggaaaattaagtatatctcctgcagatgctgtcagggatgcgaggagcaagaagactgcactcaacaatagtcagtggacacacagcaatggagggcggctggcaagagctggcagacttgtgagaaatccgaccttctggctaggcccctaaagagttctagaatgctgctctttcagatatctatggagacaaaacgtatagtttgttaatatcagaaagaatgcaattcactgatatttactgaacacgtacatgaaaagcacagtgaccacctctttgtaagtagcagggacttaaacacgcagagttcagtcacaccagctcctggcccgctgctcactgtgtgctgagctctcctgggctcataaacctgtgctgaaggttgttctgtgctgcattttcctcatcaggatctcagccttagagggtttgtgtgttaagttcaaggtcccacgttactgagcttgtttttgtgattcccttagtcttcctttcttggtgatgccacacaacctcccagaaactagggaagccatgtctgattgcagacctgagggagagctacaggttgttattttagcattagattttctagcataaaatattaaatcctatcttaataaaatgtagcttgagataagcttccacaattaacatggaagacaaaaaaatgtttcctgataatcatccgtgaggctagaacttctctctaagaatagagatatgaatgtctgcactaggaaaggatgaaggctcttcattaagaggtggcaaagtcaacgtttgaatggttttagcctagtcttctccttatgaggatcagaaaactcaaagccagcactgagggaatggtttgatctcctttcttgaaggaagattgcagaagggcttggaaaagtgaatgattaacttgaccacatttctcctagggccgggaagtgagtgcactcaaagcaggatttcctggcaactgctccagtaatgtcttactgagaatggagaaatctggaggataagaggaaagaggaaaaatggtaaattacagactgtttcaacagcaaaacaaaggactctagagaaaatcgggaaactccagtcctttggggagggtagaaacaatgcactattgttttctagaagtcttcatggaagatattttatccatggaactgcacactgtggaagccttgcagaacccgtgtcacatcttagggacacacgtcccagcctgctggaaatctgaagaacccagtatgggggagaggaagcagtgtgcagaccatctagtgacatccattaattcatggaggagggaattgaggtccacagtctgcttctacaccccaaaggaaaaggggagtgttttacaacttatttgaaatgtgaaggactggcctggcacttagtgtactcttggttaatgacatgtggattgttttaatgatgcccaaacactcttgtaaagtggaaaatataggcagcctggggtgcacatcagggtcagcatcagggaatataagctcattagtaggttaacacatacctccttttcctgctgaaaaccatggctggcctccaaccagaaacgccccttcatacttttgaagcaggtctttagtctccctacacatcttgccttatgtgatcacattccttccctcctgcagctgccctggattgagagaaatataggaggccagggaagagattgggtctcttccctctgatcctgcaggctgatgtccttctcctccgagccactgccttcctgggggctgcctcttgtgtcatctaaacaggcagacatttccaggttttgaacccatcattcattccaggcccactgagcacagactgcatacagaacagtggggccttgcacctgaggagaaagtgcacctgcaattctggaaacacgctgtggaggcacaaaacctctctgggggcacaagactaagtggaggcctctgagaatggggcatgggagtgaaccataagaagagagggaggagtgtgtgaaccagagttccaggactgaagtccccaggaagagcaggtgggaaaatctggaagggaattttcattcccttgcgaactaaagagatggagtaaagaggccagtaatagatttgggactggaccacagggggcctctgggaccatggtgaggactggagctttcatggagcagagggaggccggtgagggtttatgcagaggggaggcttaacttagcttacacccagtctgaaaagttcatttcggttgttgtatatagaacaatggagaggggagtgggcacagggaggctaattagggagcagcttcagtagcaggaggtggtgctgggttgctctaggatggagacatcagcagaagggacccgggcctgtgtgagacacctgttgaaggaaggatccaccgggcttgctgctggacttatgtggggctgagggagaagggggacctgccagcccagcttggggtgggagcaactgggtaaatatggtaaacaggaaacatcaagaaataagatactgggttggggaaagttacggtgagctcagctttgtacttgaattttaagtgtccagaagacaagcagtagggtttgctacttgacttcagtgcactgaaacttgtttgctttgcacacaaaagtggaggcattgatacctctcccacagggccattttggattgaggagctaatctgcaccaagttttcagaagtggtaagcagtatggcagtgtgagatagaatatccattggaagaggaatgtatcagttagcaggcagaaatgctgcttcccaaagagcagggtcagtggggtcattgtggaaagcggctgctagcttgagcaagcagcccacactccccaacaacacatgcattccacactcaattctgcatgtgtgtctatgtgtgtctgcattactgtgagagtgtcacatgtgtgtgtgtgtgtgcctgtgtgtttgtgtatttgtgtgcatgcttatgtgttcaattcataggagctatgaagaaataagaaacaaatgggagggaagtttctaaaatgaaagctaaagagataatcccaggctttggtgaacatgtttgaaattctttgctcttctgacccacgtcagcagggtgactgggcaggagaaggtaatacttcaaagaggaagagtttccttgtggacatccaagaaacactgaccaaagcactatgggaataaaggaaaatgataaatggatagaaagtcctgaaaggcacacagagatgtagagatgtgcacttttccaagtggagaggaatgccgattgcataaatacctgataagatagttcctggacagtctcatcctgttccagaacatagggcaactcatgaattccaaagaagccactcacccatgagtcaggggcacagacacctgacaatagatgtctgcttttcttgccaagcttctctccaccctggcttattcttctctggagagcttactctctgacctcagggacaggaatataaaaccaggggagtcaaacgcagcatcctgttgccctggcctagaaaatagaccttgatgtacttgtcgccctagcatgagtgatcagaagtcttccccaggatttttctaccagtatacagacaagagtgtccaaggctgacaagaagatctgccagccaccatgcctccagactcccagtaagcccacctggaaggaacaaagctaatactcagtcagctattgctgtgtaacaagtcaccccaacatctagtgtcttacaacaacggcatgctcatctttccttattcttcattctgtggtggaggggcagctcttctgctggtcttcctttggctcctcatgaggctactaagcacccaggccctaagcacatgagcttattgagcctctgcttgcatcatgtcactgatgtgtgattggccagagcaagtcatatggccaagcccagagccagactaaaagtggacaccacgagtcatgatgaatcaggatccatcattgtgaccattgaccgcagcaaagttcagatgctcctggtggcatcaaagttcatggttctggggtctctttcttgtgtcaccaccatgtgaagatccttgattgatgaagaccagcagacatcagagattactctcattccataatgcagggaaatatttctagccaggaagatagggaagagagaataccttgtttattcaatctgcaggaagtgtttactgagaagatatcaaaaccttatctagaataaaaagaaggattacacaccttaccagtattcaagtagctcaccatctgagaaaataagccattcacatacagaaaattaaagtacaacacatcgatggagacgccatgaggcgtcttactgagcatgtactaggtgcttcaacatcctttcacagcagttgtgattttatcccacactcagagacagaacaagaaagcttggagaactcatgcaacttgcctgaggcagagctggcaagagaagccatcatagaggaggcagaactttctactatggaaagtccccagcagcaaacactaccccagtgctgtgggaggttcagttgtgacgggtagggtggtgtgaagctgcgaaggaacagactgcagtgctgcagggtcaatatggtgaagcaggggctggggttcctgaggccgtgtaagaagggcagtattatattaactctgatggctcctactgtaatccatgcccctagacttcccattttacccatagtacagctcttcataattatattgtattattgataaataaaattataaagagccactttttagaaaatgcagccagtgattttcctggtcctccttccaatcctccttggaaaagtgccataagcagccaatgtcaatggaacatcttcaacttacatattcgaacaactcattgggcaggctgaacctgtgtatttcatggataacaacgagttgccttttgatggctggccttctccaatgcctctgagatggcagctggcctgggcatggctatggtccagacatatatcagatcagaggaaaggatatgttttaccagtgacccataggtagatgctctctcctttagaagatcactgttttagtccattcctactgctctaacaaaataccttagactgggtaatttataaataatgtaaatttatttctcatagttctagagactgggaagtccaagattaaaggcaccagcagatttagtgtctggtgagggctgctatctacttccaagatggcatcttctcccattcaagtactaaccaggcctgatcctgcttagcttccaagatcagatgatattgggagcattcagggtggtacagccataggccaagatggcatcttcttgctgtgtccttgcatggtggaagagcaaaagggtaaaacagactcccccaagccattttataaggggactgatcccaccacctcctaatcatgttgtaacggccccatcatttaatacaattgcattggtgtttcaacatgaattttggagggacacaaataatcaatcatagcaaccacaatataccagtgccagcatgattttaatatgtcgttagtacccattcctgtagaagaacatgtgagggtctcagatgttcatggtagatgcttgcttccctgtgactctgaggcagatctaagatgtacactgctgacacaaactgaataatcccagagaaccctccaacaattcttctccccagcagtctttgggccactataatcagagccaagattttaaccttggctgcgtagacagactctttgggagaagacacagctaattttcaaaatgtttcattagaaagcctcattatatcgtcaatttaaacctatcctgaccatgatcctgtaaagatttccttcctccatcaatctagttcatagccttagaattacctctaccaaacaaattggaaagaaaagaccttcagatggggcagtagcaaagactgatcaaatccagtgagttgctttgtattttcctgaaccttggttcccaggtatgagaatgatgtgcatgattaggaattaagaagagtctgggatcctgtcacccatcaaggcaaagatttatcttaaactgtcatgcaaaacaaatgtggcatagaataaccagagtgtcatggaaatattagtgtggttgaaagtacgtgtgtttaaaattttgttaatactgccaaattgtcctaatgagggccacaccaacttcctctgtctagagcatctctttcttcatcgtcacacagtattatcagacttctgtcaagctgaacaacaaaaaatggtgtttcactactgctatcatttgctttccttcagccatgagatggagcatcttttaattttttataatccataagtacttcttttcttgtagctattttttatatccactctccatttttctttaggggttatatgatttttcttattgagttgtatgagctttccataaattcagaaaataacatttttatgcattatgattgttttcaattttttgtcttctgcatttgttagtgattttatttttaagttgtcatattcaccaattgtgtcttcaaagccttcatagattttcaaaattttcttagaaaggcctatttcactccaaggtgatacacattcatccataattttatactgtatttttattatggtaaaacctttgattatgtggaatctgtatcagaggaaggagtgagttggggatctggggatatacacatatcttcttctcaaacttttaccaattgtttttcttggctctttcctatggtgctttatattaagaggtttttctgacattgggctacttattacaacacttgtccaaagtgcattatttccttaaatagccagtgattcaaatgtcctattatttaatgtatgttttctgcatctacatttgtaatcacacttggtcttttcagtttctatttctgtgcgacagtgtttgcttcctgctttttgctctttagattgcttatttttcatgtgatacattttaatattttgtttcttgatttatcaactttagatagtatctattgactccatctcataaaagaaaacacaggcatcacactggtttccacagccctgtacttccttctagttttggtcacttgcacatctattttaggcctttgtaactttaagcaatgtatctaaatttgcttaaaacaatttgctctattatcttttgctacataataaattaccctaaaactaatggcttaaaacaccaatacttatttatgatttctgctggtttctgcattgcaggaattcagacagggcacagtggggacagtttgtctctgctccatgagactggaggcctctactggaagactcgaaggctggagcctaaagccatctgcaggctcattcactcatatctggtggttgatgcttgtgttggctgaaaacctaaccgggactcttagctaagatgcctgcatggagtgtctccctgcagcccaggcttcctcacaacatagtggccagcttccaagggtgagtacagagaggaacagagagagagagagacagagagaggagatcagccaggtaaaggtggtatcctttcatgacctagcctgggaagtcacacagcatcatttctgccacttgtattcattagaaatgagtcactaagtccaatccaaattaaaggggaggggatctagtctgctccatgatgggaggattgcaaagaatcagcagatgtttcttaaagtcaccacagtggatgatatccttagaataaggatcacgatgtatgatatatgctgtgtcctgcaaggctttgcatccaaagaatttttaggagtgcccatcttccagcacatccttgaccatgctgcttctctctccccacagtggatcttaccagccttttagttctcagagctaccactgcccttgcatatcacgatacgcgcttctgcctagaaccctcttccccacactttacagagtaattcacagagaattactctgcaaataattcacagatatcagcttggttgtcacttcctcaaggaaacattccctgacctccctagcagggttgatccccccggctattcactgtcacactgtggtgtctctctccttcatggcacttggtgacaatctgcatctctttctagacagtaaggtcctcggagcagagactgctgctgtccaccagcatcacttagcacctagctcacactcaaaagttagtacacacttaataattacttgttgagttaatctgtctcttgatttattagacataaggaatatctatcacaaggaaaaatgtgaaaattgatacactcatacttcctctcattcctcatcttctacctctaattatttgttggtaaaatgcattaatttttcattgccacattcatcatatttttctggctattgccatactttatttaaaataggattctttacttaaaatagaaatgtgtttgagtttatcacttgtgcttttgtgataatgcttcatttcatcttctagttgtttttattttattttcaagaagtttatttaaaatgtgccatggattccataatcatgtcttcctttatgtttgataatatctgtctgttgcttctatacctaaaagagaacttgctgcgtaggatatttttgggttacactttctttgcctatgcattctgtattgtgaggcagttttcttggctcagagctcaaactctgtgtgtgactacttggtttgacagctttctcctatactaactgtataatctttcttttattttgctgagacagggtctttctctgttacccaaactggagtgcagaggtaccatcttggcttactgcaacctctacctcctgggctcaaatgaacatcctatctcagctgcctgccccacccccaccccaaccaccatacaagtctaatttttctttttttttttttttttgtagagatggggtttcaccatattggtcaggctggtctcgaactcatgggctcaagcaatctacccaccttcgtctcccaaagtgccgggattacaggcatgagctactaagcccagcctaactgtacaatccttagcaagctaattaatctcttcattcctcagttttctcatctgtaaaatgaaacaataatgatgttctagacaggatcatagcaaggaagaaaaggcatagttaaactggtaatttgaagacagtttaataagggaatatttgcaaagtgtcagctactgacagcagagtgactttctctacacctctctcaccccaggcctgagtgaaaaacaggaaggagcagtttctaaacccagggacaaggagggacatatgaatagggcctcttgacaggagctaaaatatattgtcaaaggataaaaccagaagcgggggagctggagaaacacataactcatctttcctccttatctttgggtcatggtctcgaatggacaaacccaaatggaaccttgagaacaggaaaactaaaagactatttagcaccaccctggtagcttgaaactgggcataatggaagtctgtctaccacaggcatcaaaggcatcaacaaatactgcaaacatgggcctctttgttggagagcctgttgtttaacatttactagcacaccactttttctgagacagaaatgagggtggaggtgggtggagagggtctctggaaggacaaaagtaaaaatgttctgccaccaattcccgtgagtattaagtgagagaacaaagacataccttgttttcttgtgcttcccttcgttgcatgtctttgataatgcagtttttacaaattggagtgtgtgacagccttgaatccacaccatttttccaacagcatgtgctcacttctttctctgtgtcaaattttgttagctctcataatacttcaaatttttctttattattatatttgttgtgatgatctttaatcagtgatatttgattctaatattgtaattgttttagagcaccatgaaccgtgcccatataagatggcaaatttaatctagaaatagtttgtgtggcttttgtttttcaaacagtctcgctctgtcacccaggctggcatgcagtggcatgatctcggctcactgcaacttcttcctcctgggttcaagtgatctcctgcctcagcctaccgcatagctgggattccaagggcacaccatgacacctggctaatttttgtatttttagtagagatggagttttgccaggttggtcaggctggacttgaactcctggcctcaggtgatccacccgccttggcctctcaaagtgttgggattataggcatgacctaccgcacccagccgtttatgtgttttgactgccccactgaccagcgttttcccttctccttctctctacctctcctagggcctccctattctctgagacatagtaacatggaaattaggctaattaataactgtacaatggattctaagtgttcaagtgaaatgaagagtcacatgtctctcattttaaatcaaaagctagaaataattgagcttagtgaggaaggtatgttgaaagccaagatagatggaaagctaagccccttgcaccaagttaggcaatctgtgaatgcaaagaaaaagttcttgatggaaattaaaagtcagagaacatataaatgataggaaagtaaaacatcattattgctgataggaagaaaattttagtggtccaaatagaagatcaaaccaaaagaaaatcaaacaaaaacctaattcagagtaagctctgaactctcttaaattctatgaaggctgagaggtgcaagaaagctgcagaggaaaagttgggagttagcagatgttcattcttgaggttggaggaaaataaaaaagccatcttcatgacatacaagtgcaaagtgaagcagcaagtgctgatgtagaagttgcagcaagtcatccagaagatctagctaagctattgttgaagttgactaccctagacaacagattttcagtgcagatgaaacagccttatcttggaagaagatgccatctgggactttcatagctaagcagaagtcaaagactggcttcagagtttcaaaggacagactgacattttaggggccaatgatgctaaatctactctgcctgtgcagagtagataaatatggaacagctaagcttggatgacagaacatctgtttccagcagggtttactgaacatttgaagcccactgttgagacctaatgctcagaaagaaagattcctttcaaattattactgctcattgacaatgcactttgtcacccaagaactctgatggacatgtatgaggacagtgtttcttcatgcctgctaacaaaacatccattcttcaattcatggatcaaggactaatttcaacgttcaaatcttattatttaagaaatacattttgtaaggctgtagctgccataattaaataaattactatctaatttatctgatggataaattaagttgggcaaagtaagttgaaaacctctggaaataaattgaaaacctctgtaaaggcttcatcattctagatgtcattaaactatttgtgattaatggggtaaggtcaaaatatcaacattcacagaagtttggaagaagtttattccaacccattgatgcctttaagaggttaaagatttcaatggaggaagtcactgcaaatgtggttaaaaaaaaaataagagaactagaattagaagtggagcctgaagatgtgactaaattgctggaatttcattacaaaaaagcctcaaactcgggatcatgcaatatacccttgtaacaaacctgcatgtgtagtccctggatctaaaattaaaattaaaattaaaaaattcctgaacagatgaggagttgcttcttatgagtaaacaaacttaatggtttcttgagatagcatcaactcctggtgaagatgctgtgaacattgttgaaatgacagcaaaggatttagaatattccataaacttcataaaacagctgcagcattcgagaaggttgactctaattttgaaagaagttctactgtggataaaacactgtcaaacagcatcgcatgctacagagaactctttcctgaaaggaagagtcaatcaattgtggcaaacatcattgttgtcatcttttaaggaattgccataccacctcaaccttcagcaatcaccactctgaccagtcagtggccatcaacattgaggcaaaaccctccaccagcaagagattacaaatcactaaataaagactcacatgatcaatagcatttttcggctgtatttttaaattaaaggatgtaggttgttttttcttatataatgctattttacacttaatagactacaatatagtataaacagctttatatgcactgggaaaccaaaaaccttgtttcactactttattgcaatattagctgatttgctgtattgtgctggactggagccaaacctgcaatatctcccagatgtgcctgtacatgctcagtattcagacaagattgggggcgctcagggtggtatggctgtagacgatatccagtgttcaacacagtgccccacactctgtaagcaggcaatggagtgttctggcaccaagtgttcaagtggggaagttaaatggaagccagattttccttataattcaataactctgcctggatgccatagatgtctttcttcctccttgattttcaagaacttagccaggctgggacgatttttcatatcagattttccaggagtatgttgtgtcctgtgctctgcaaatttgtttttcttgtattataggtttggatacttgctgtatcccatctatcgggttctctgcttacattccatcgccttcgtatcccgtgtctattgttatgtgattatttttacctcttggcctcttggtgacttctccatattcactatgcttatctcaagtggtccttttttttttttttgagacggaatcttgctctgtagtccaggctggagtgcagtggcacgatctctgctcactgcaagctccacctcccaggttcacagcattctcctgcctcagactcccgagtaactggaaccacaggcgcctgccaccatgtccggctaatttttttgtattttcagtagagacggggtttcactctgttagccaggatggtctggatgtcctgaccttgtgatccgcccaccttggcctcccgaagtgctgggattacaggcatgagccaccgtgcctggccctcaagcggtattttttaggttagtgatttgatattcagctatgtctaatctactcatggtggcttaaatgtatttgctatctttatggccctcgatttgctttctttcctctgatttatccttgggtaatctcctctgttgtttacttgttagcctttgtgttcttgtggtattaaattgacatccttaagattctccccagaaaaaatatgtccaggtttgttttcttccagaacatacactcttcatgccatttctcatctttttttagacaagtatgtgtctttcctattttgttgtcatctcgttcatgctttagtcaacacctcaacaccaggaccaccactccacatcctgcacccaggaatgcattgctatgcctccctctaccttatctgagaatggtcagcattcctggtggaatttccgtgtgtggtttaggtattgtgtgttccattttctccatactgtgagggtagaagtggaagtagagagaacctctgaggcggtacttccctcacacccagataagagggccttggcaacgtgctcaggaagcccacttttcccaagcaacagcacggtgtgttgaggaacacagcgtacctctgtcctttgggatctggggctcagctctggtgccagggaacctgcaatcctgtacatctgctcccctaaccaacagcattcaggcctctggggatgcttcctctctcttgctccaggtctgcaaaaccaaatgggactgtgtccaaatgccatgagggtgtgtgggctgtactccggccaatgttggagatggacactctttggggtgcaaggaggatctgaccactggaagagctcagggaaaaataaatgaactggtagagttgtggttcctttgtctcagatggggcaactcctgcaaggtctcacactgagtggggctcccaacagcattgggatccactgtccactctcatcacactccatgtgtggctctggagatgttcaggggtgaatgcagctcttggaaccatcgtctctggcagctgaggaaatatgtagtgtcagatgacttctgacaccttaaatctttatacgtgtaggtctgtgtgacataagaaaacacttacattgatgcctccatggacagtgagtaataggtttgcaaatagtttcatttttataaaaagtatgtatttgcaagtaaatatcatataaatatttatttatttaaaaattttgtttattattttatatttgctgattataagtagtatttatctcttaattttaataggtaatgttgattatattgaggaaaaatatctttttaggaatacattttgatttttaaatgttttaacatttttttcaacttacattttgataaaaacaaatttggtgattaaaactttaatttaatgaaatctcattactaaacctttaaatcagggtttctcaatgttgacatattttagatacaaaaacctacatataggagatagagatattttggctggataattctgtgttgcagagctgtagctgtatattgcaggatgtttggcagttccctggcctctgcccgccagatgccagagcacctgctccctgcctccagcagtgacaccagaaacatctccagatgctgcccagggtcctctagaaggcaaaaccaccctgagggagaactgctttagattatggctgtcgaaagaatgcacatcaggtgaaaatcctaattgcaaaacacattcagtgatttcattaaaataatacaaaaatatactttcatgaataagtgtaggaagatttatgtaaattgtattactggcctatacctcactaacacaatgcctagactcgtgcagtcactcagtcatctttgagatttcaccagccttcagtcatgcaaaggctaagggtttgcaagcatccttgactttgcctttatgaaggtgtataattaaggtaggtgatggaccatactctatgtaatgattagttaccttgatttaatcttttaaacagagagctcacaggatgcggtcctccactgggcaatgtgagaagctggccaacccccagttcagtagctttgactgtgagtcctgggctctgctctctcaccttctgttttattagaagccctgaaacaatgttatccctgcttgtttgaggcatattctaatatcatgggaagttctcctgtgcttcaggatggagcacaccagggatacagcagtgtccgtcctgccagcctcagtctctcccagcagccccttcagctgcctgtgctcagggaggggcttgacctcctgtgctgctgcttcccaggcactcctgccccttcagaggaggtggtctgatgttgtttctccttgctttgttttgctaatgtactgctggtagctggagacccgtagctttgactgtccatggtttcctcttccccctttctcccacctggaagaaacaagagagtgcatttccatgggttttcccatctctgaggggatgtcagtcttgtcgggaggggcttctgttctaggtgttcggctctgtgatggtttttacccatttgatgatgatagtgatgtccacacttccttcttctaagttctagaagaaggaaaactttgaaatctggtctcaccctctgtcgttacccacaagttcttgcttttaattggtaaactgttaaaggtatcacttgaagttgatttttagtcagtgatattctaaaaactatttaaaaatatcaagtctagcttctcctatcaatttttcttgtgtctatggtctaataataggtgaataagtagattgcaatacattgctatggaatactgggcttctaacaaaaataatcttataggagaacatttattgacaagggaattatcatggtaaatttataaagaaaaacaagctacaaaacaatgtaatagtgtggcaacattttagtaatgttctatatttgcataaacagtcatgtgccacatagtgacatttgattgacagattgcatatatgatgttgttcctggaaaattgtaatgaagttgagagattactattgcctactgctttgtgttacagttgcctacagtattcagtacagtaacaggctatacaggtttgcagcctaagagcatgggtcataacatatggcgtagatatgtggtaggctatgctatctaagtttgtataagtatatggtatgatattttcaaaaggagaaacttaccaaacaacccatttctcagaatgtatttctatagattagtgaggtatgcctgaatatgaaagtcatacattgacgtgttaacccaagtcttcttggagcaatgagattataagagatttttgtttttgtttttttagtctgagctattctatttctcaagtttaatgcattcaacataaattagaaaagcattggtaaaacaacacatgccaaatgacatggctttttttgtgaatttcaaagttccacattaacagttttggcaggtggcctctggtggaactagttccccgctcctggtctaacagcctcaatggaagggacaaactcacaatcagaactttccctacccctatcctttgctcttttgcatatttctcagtgatgcagaactctcttctctccaagttcgctgctgcactgacacatgcctcacgtccactgaccgagagccgaaggaaacacagcagcaccatttccaggtggacttttcccttccctggcagaagaattcagtcacaccatggatttccagggctacttgaattacccagattggtatttatttgcttagggtttatatctctggtctccacatgtccttcccagtaggaaactgctcagataatcacacagctgtgaagacttctccccaaaggtcataagctttggtcccaccatctgtggggaaacatgtgtttctcgtactctgaaaggactgttcttggctttaaattccagtacttagcacttgtaaaattgagataaagcacattggcagctttgggacttctgtgagccaaccactaagaatggactttgggaggctacaccgctacatccattctagagttgcatttggtatttcctctaaaagggcttcaccactcacctgggggctctgaggcatttgagcacttcagctcagtttttcagccctgaggtgagacaggaaagcaagcttgcccaaaggatacagggaagtctgagaccaggcccagattcagaaccacaggctgaggagcttgttacttgggctgagccgtcctgctcccatagctgggtgcacccaaaaacttcaaatgtgtgcctcaaaatgaaggcagcatgccaatgattggcagtgcatccaattcactcttcaattccacatttggactcagtgcttaggggatggggctttaaagtgtatgtttttgggaatattatatacatgcaataaaatgccctattctttggtgtttgacttgatgagttttgtcagttttatatacctgtgtataatcaccactctgtatgagacacagaacattatatcatccaagacggtttcctgtgcctctgcccagtcaagcatccactgtcccaacccaaggcaaccatggtctgacttcaagcaccaaaagattatgtttttcatttctacaacttcatgtgaatggattcatacagtatgtgctaagcttctttcactcaatgtgtctctaatatttatgtatgttgtatgcatcagtagttattttttatggttgagtaggagttcatgagtatattcacttgagagatgtttggatggcttgtcctttgagttggttacaaacaagtctaccatgagaattttggtgcaagagttcttgcagatatatgcttttgtttctcttgggtaaatgtctaatagtggaattactgggttgatgtggactcaactgtagaagaaaccaaatgagttgcttttgaaaattatcatttctggtagactcatagcctctcatagctgaacgaaaattttgctccttggccatttggtccaacctcgtcatttaagataaggacaactgagatgccaaggagtcatcactctttcatggctgtagatctaataagtagctgaggaagagctggacccagcctttctgacctcatacttccttaccaaggagcattagaaaaccctacttattcctgcttgtgaggtaagagttatttctaaatgcaaatatttgttttcttgcttttattcacatagtgaagaaaattgaatccatggtgaccttattgaatccacacagaaccttattatacattgattcataaggtgttattgtatcatagctatagacagctgtggagattagggtaagtctacactgtcttgagaacatgtcttagaatttaagttttctccaaatacgtagtattgattcggctttaccttttgctaagaaaatgaatgttggtaacttctcacatagtaataataattccatttccaagaacatctcctaagaacataaatatagatgtgcaggagatatatgcgagggtcagaaatgctgaggagcagggcatgactcactgcactagctcatgccgacaggccaagaaggtgacaacagggccctggctgtggatttagtagcatggatgtcatcagcaaaagactaatttgtctccagtgtctaaaacagtgcctggagctccagaagtaggacatgattgattgagtggcaggggcatctcaagttgactcgaatatcctttgtttgagcatactcaagagaaaatgggaagataaagtgagatttcttttaaaggacagcaaggaaatgaggtggcacttgtaggggaatatagggctaagacagggttttctcaagataagagaaatcaccagatgtttgcatgatgttgggagtgatccagtagaaagaaaaaagtaaaaatattctaccaataaccataacaaatgaccaaacatattgttgctaaggcaatgatatcttgactgatgcagggaaaaaagtaacctcaacaggtcaagtcccaagtgtgagcctgtcaccagcatgcagtgggaagtacagtttctggaactctgagcctaattctgcctccaagttgttgttggtggtggatgagtcattttgcattgtcatctccctttccttacctgtgcaaagaagggttgaaatcagactcccccactcgcacacctcatgataacttcctgagggctgccacaggccgtcagcttctctctctttgtgtgcaagccagacccttagtaatgcaagtccctcatcctactctaactgcatgagccaagctcagatcccctgcaggaaaagaattcaaggccttctttgctcagacaggagacagattcttggaagtagtaacgtcttacccaacatcttgaggaagttttcataaaagcctgggatcaacatcatatgaaacatagccatcaagttttgagccctaaagagaattcagaatagagtgaggtcaagtgaatgtctaactgctgagtgaaggatcatgggagatttcaaagggctcttgttttggagttttcaggactttccccaagaaattttcatggttgatgtgtgctccagtaagaacaggagaatatgaaatccggggatgagggacaggggtggggagtctaagaggctaattatcctctgtgtagaatgaaaccccatgaaaaaggagcactcctgttacacattttattgttagttagcattctatatgttactaaataattttgctttactactttatttatagctacataatcttgaacaagtcacttatcctctttgagaataattttacctctaaaatgggcatactatgactattttgcaggattgtagagtaaatgaaaatttgagtctttcaataaacatttatcatcctaagtgctgtttttattcatacaaaatggaaattattagttgtagtgaaaccataagtattggctgagaaccaggcacaaaaggaaccaaatggaagccccgcattcaggttgaatctaggaagcaatgccggctgcaggtgcagaattcatcagcagaacatggctctcaggacatctttgtaaaggtctcttgtcttctggtgtgaggcaggccatgtgttcctccaggcattaaggtcagaatcactgataacagtttggatgtctccatcaaaccttattttgaattgtaatccccagtgttggaggtggggtctggtgggagctaattggatcatgggggcagatttctcacggatggtttaacaccatcctcttggtgctgtccttgtggtagtgagtgagttcttgtgacgtctgtttgtttaaaagtgtatggcacctccccactggctctcttgctcctgctctcaccatgtgatacatatgcttccactttgccttcaccatgattgtaagtttcctaaggcctcaccagaagccaagcagatactggcaccatgctttctgtacagcctgccgaacggtgtgccaattaaatctcttttctttataaattaccagtttcggatatttctttacagcaacgcaagaacagcctaacacaatcaccacgggaagacctcctctccctgatggtggctgatgaggagactcacttcctggagtagtccagttaccctcccacagctatcacttgaggagggaaacacattttctcaggactcccttaatcccctgtgtcaatccaactctctggcacttttgcctagactttgggtcaagtagaaaaaagtgagcagcttttctgatggtgtaactgatatttctttatcctaggaatgtattttggtgcaaagcttatagtgcagaagtctaagacccaaaaatcagttaaaaaacagttaacacatattttaaaggtgctttacaatgactttgcaaatatgtattttaaatatacaacttcttcctaagttccattatttgtacattaaaactgctccaggaattggtcaacttcaagtccagccaactctgacatttaatttctagagaaactgggcatttctaacaaaaatctaagagcttagataaatagtagtaggtaattttgagatccctgctttgtgaatgggggctaagaggcagaactaatttctgctgctttctctgagctctcttctttcacatattttttcagtattcaggaatttcctaaatggctttaaggataatgtgatccttttctagatgagaaagaagaacaggggctcactctgtgtaatctctttcctgcttcttagagagggcactggggacattttcattccttcatagttccccaccctttccaagagtgcatactcttttgcttgacaacctgccaggtgacttggcttaaaaataggttatctcattcatcaacttaacaaatatttgctgggcatatcctatgagctgggaaccgtgctagaacaaagaataaaatggagcctctgcctttatacagcatatcacatggtcaaggcagactgcaattatgacacaatgtgtcatgttaagggtgagtgtggggactgaggaaaattggaggtttttccaaacctcagtcctgaagaattaaaggaggcatcctagagagagtgatgtggaacttgagacctaagggacaagtgggagttagcaagggaataacagtgagagttattaatgtatagatgttttttaaagtgctgaggctgaatgacatcacctggagagtgagcatagttagaaaagagaagctgattatggagggaaaagggaaaaccaacagaacaactgaaaaggggaaggaaaagactagaagccaagggtcagaagtgcagtggggaagaggagtcggggggacactgtgtgcaaaggcatcaggtgaaagaacagccaagtgcatgctggcaactgaaaggagtctgtggtgtggctgctgtggcatctcattaaagaacatccaggcaggaagctgggaaggtggtagggacaagtcttaggagccccagacaccagattagggaaactggactttatcctaagacaataatagaaagccacaaagaggaatatagaagggtggggtcaccttaattcaggcaaaagttgggagtagcttcaccaaggggtggtggtagcagaaattatgatgaaggaaagtgaccaattcaagaaacagaaaatagaattgccggagtttggagatgaattgattggattgaggtcttgagtactggggaacattcatatagaggtgagcagttttaaggcccaagatactgagctatgatgaccattttgagttgaaggtagctgtggtcacaaacactgcctcagtgggtgagaaaaggggttgtgcttcttatttgcactcccaagtaagcattcatagctattaattaaatggacgagcaagtaaataagcaaatgaatggatgcatccaggtgcatccagtccagtgacagttttatgtgatgagtatagagacagagcaaggctggcatgccaacaggggacccagcaaagtgtcagagagaagccatgggagtggatgtcaccagaaggggactgtgaggaggaaacgacactgaggtcaggaacttaaccagacaggcactgaagaagcagacagaggaagggagctcgtgaaggaggagagaggtgggaggagagccaggagtcagataacttcgaatgctacagagacaccagtgaaggcagaactgagatggggccatgaggtttggtaacaaggagattgctgatgatctgtgtgcaaataactacggcaaggcaacagagtcttgttcttccaatatgtcccttggtccataagcgctgagaggaagtgacaatctgtgagtagaaaccaagtgaaaggagtgttagtgcactcttctttagaagagagcaaggcagagcctgtgagagaaaaatgtctttgtctcttgtctctctttgtctggctcaaggtaatgtaattgcctcagacttcccagggaagcaagtggctcccacgttcctaagcaaaggccaagccatagaacaagggcagaggccgccactgggaatgtttgtgttgttaattttttgtagttgaatcatatcgggaaaattgtttccaagttgctcaaacatggatagagaagctaatgttttgctggaggttggcatttttccctgatgacatcacatgccttgtgtcaccagttaagggatcatcagtaaagcaagtggtcaacgctatgcaaccacaaaaatatgcttctcctcaaaagataataataaaatatgtagaaacaaaatcggttctaacagggagactccttggtgaacttaaccatctagtcactatataccaagggcacgtcttaaaaacaaaacaggaaagcaaacaaacacaaaaacaactctgctcctaaccagcatttatcatttagcatacgtgggttttaagaaaatactgaaagagattagctctagagaggtgaaatgcaaatgcaggaggaaaacaatccagggttaggaatgataccatatgtctgaataagaatcatttccaaaaaccattctcctgtgacttcctatatttctttgtttctggcctgcataagagaatgttttcttaagagcaaacatgtaaaatgaaacaggaatgactattggctgaccacgaaattttctcccaacaagtgcatgcactgggactcgagattcttcaactaaacccgagtgttacaccatgagatcatgaagccaataaaacatttgctgcatgctaactatgccaaatctcacttttccagagatacgaggatggaataaaaagagaaaaataagcaaatgttgaaatggaaccatgtgttctatgtgcaaagcagaaaatctgaacagtgcaaggagggtggagaatcacagggcctgtggggttgagaacaagatggcagcacagggagccactcaagcatattcttctgcttgacattataccagcctgattcacaccagtcactggtgacgagtggtcactagtaagcacaaacattttttctggaatttacttccccaaattaatatttttttttccaaattaatattttttaaatgctttatttttttggctttcatgatgtcatgatgtctccattttgcttcaatcttactggccacttcttctcatctcccttgctgtcctctacctctcttcgtcttccaaatgcagaatacaaaatgccaccttctccttttgttctaaacatgcttcctggctgacctcatgcactccactggtttttagacatcctgtaaaagttggcaagttctcaactcatatctctgagattacctcttcctggacttcagataccttatatgacaaaatgtggttgttattcttgagacacctttgatgtcagtaaatcctactcactttatcttccaaatagatgtgaagcgggccgctgcatctgcaccactgatccaagacatcatcatctctctcttgggtgacagagtggattctgcttgtgcttcttgctcctctacaatctaatcacccctcttaacattcagagtaaagttttgaaaatggtaatcagtctagaatccactgatggcttcccatagaatataaaatgaattctaacccctctccccctgggatatggacctccctctgaacacccatttcctgatccccaccctctatgtttggcaaccctgacttgctctcaggtctgaaatgcgacatgcttattgcagcctcagggcctttgcacaaacaatgctttctgtttgctatgatcctccaatctgtgccctcttagctcattttgggtcattcagaatcagcttagagatgaccttcacagacagcccttctccagcggttgtctccatcatgtctcctgtttctggcctgcgtaagagaatacaggccagattctctctgcaacctcggcttttcccttgctcagctgtgttctgacttgctattacgtatctacacaggcatgtactgcccatgaagaggtgcttcctctcgctgtcagaatataggatagcccttagtgcacagagggcaaccctatcaatatttgctgagcaattgactggctcgatgaacaactcgtgcatctcttgtggatcctgcttcccagggttaacccagataggagttaaagatctggccataattcaatatgactgtcaaaattccaagaagataaaataaagatcaaattagagttgaaggtgctttccctaatttaatgaatgagtcttaaatttgtttttctggaaattttacagcagaggtcattccaaatttcaaattgacctcaacttttatttgccctcccattccacctctcccctcacgcatactagagtcaggagaaacccagcaattctgaagctgactttctctcttcattactcatagaagtgatgaaaaaaaatgattttgataaaaaaaagacagcatagttcagcaaattatatcccccaaacaccgttattatctacttgactgaattcaacctttaatattttaaagttgaaattcactgaactgtggtgatagagagcatatcggtgcctgcctgaggcagaagtgggtgaagattgattgtcaaggagcaaaacactttgtgaggttgaggaaatgcctttaccagggcagtggttacgcgggtgtatgcatttgtcaaaactcatcaaactacacttatatttattttatgcaaagtatacctctataaaggtgatttaaaaatccataagagttactctatgccaagcaccctgctgaatgtcttatgctgggtattctaatatccctgaggtggtgtgctataaagtacgaatttgaacagagttgctctgctacagccatgatctaaatcctatgcaaaacctttacccaagaagtcattttttctatttgagtggaaaaaaaagttctctattttaatccagatgtataatggtcacctgaaatatttttactgaacatattatctctcttactatgggttccctcaaaagcagattcaaacaaggattggggtgcagttgttaatttggaaagtggtcccagtaagccgctctggtggggactgggaactgagacagggcagagaaggaagccaggccaggtgtgctaatgatcagttgaccatgctcaggacttggggctcggactgaccaagtactgtgggagatggcgtagaagatgcctcagtgttgtcccacctgaaggaggagaccatggtggcgtttatcgagactccaatgtcattggatggagtctgctcctggggcgttaattccactgacctctcctcccgttcagctcatatactatgccagctttagaccagaaaaacccatcaggcagagtcacagatgcttgcacttagaagcggttgggttggggtgcaggaaaacagcgagtgagaagagggtatggaggtccacaacagaggctgctaaatagcatggcttgtacatgaaaagtccatctaagctttcttgttttgttctttgtgatttgagaggttttcgttttgctttgtttttcttcctctactgtaactttagattgattttttgtagctcttctgttctaaattcaaacaccaagattaatcatcatcaaaggtaatgacttagactatttacatttataaaatcctcatgtatatatgagaatgccgttccaattcactaagcccttattatgtaccagatatgaaaattatgttctttttttgtcttgattgtcaaaacaactggagattgaggatgatgatgtttatccccactttaccgttgaagagactaggactttggaaggctaagtaattgcccaggttctagaattggcaaacagggctggagcccaaagtccaagctctttcactggtctccacagttgctctagatctagctctaagcacagtgcttattccccagtggtcatctccatctcagaatcagagcatctgagatgccaacaaagaatcaaaaaggctattggtgggcatggaatcagaacaaagagatatgaagtgtttagggacacaaagcgtgtgaacaacttatataaatcacataaagatactcaccacatgtctacaaaagaaaatccccttttccctgataataccataaaaaaggaaatagtcctcagaatgacccattacaataaggtttatttgtagcatacatagttgcaaagtatgtatttaaatgttgctgtgtccagggtctgagatggcagggcctgaggatatgggtgtggcactgactgcataccctgcagacagctgagtatcccagccagtgggcactcacagaatgtactctctgactatcctcccccatccaacactggagaccaacccacctattgtcacactttctgctcactggcccccatggcaccatactatctttagtttttttccactctctctaccaatgaatactatgattaaaaataggacttgatgactgactttgtaacggggaggtgtctgggggataattccttcttgctataaggcctctcctttcttttctgctcacaaccctttgtaatgactctctttccaccttgaacccacgacgacgacgaatttgcctccttccttgactcacttccccctccctatttgcatttcctggcataacacaaataaataatttacactcagatccttggtttctggggggacccactctaagacagtatatcacccctacaaatcgggagtgctgtgatctgactccacaaacagatgttcaagttcctgagggcagagaggggggttgaaatgttcacaccatccacactgagcctagagcaccacacgtagagctacaagtaccctgcaattttataaaaagttgtatgatattaacattttacattttggggttaaggcaccagcgctaaagagcagctgcaggagccagtgcgctgagcctgtcatgtgcgttagtgaactggctgcaggtcactgtgctcagtgacaatcccattcaaacctaaatttcatcctaggtgggtggtgcggaaatgacccagggaagggagagagccctggagtgatattgttaaactaccaatgggtagctttgggctaccattcaccgtttattgcctttctctttgcacaggttgctggggaaatcaagtccaaaattggtgacttgcttctagcaaagtattgacttgattccatctgttattttttttttcttatatcaacctcatttccaacactgctgcctttctccttcatccttccgactccatccattttttgtatttatttttagcttgtcatgtgtttatcctatatgtactgcaaatcatttttaggaacccagataagagttaaagatcaaaggagcccctgtcactgcctgttaccagtgaggacactcgggctggagagaggaagaactaatgtcaggtcccagagctgatgaagagcagggtcaggattaggttcggggtcgctgtcccacacgtcataggacttcctttcgctgtggtgtgcaagggttcattttctgcccgtttggaaattcagtctcatctgggcagggatttttgcctgagaacatgtgcaggaaatggtattcttttgcctgcaactaagtgttagaacaattagggtggcctgcaattttatggtcagctctcttttgagagcctaatgatttccagctgttgtccctgaatacccagcctctgggaaaccacagattgatggaacctgggcttcgagttctcagcacttggcacttgagtttcaaaagagagatacccaaaataaccacccttccacaagacagaggcacttagagacatttggacgcaggtagtgctgcctgtgattcataatcaggatgaaacaaaaaactgtgtctaataaggattgattctcttctcagttcttttcgtttcctcaaagccaatttcagtaacactgacaattccacctgtgccacttagtgagtatgttctgtaattcttttctctaccctaggaagctaccttcttgttgatatcactcgtagcctcctttccaagggttctgacatttcaacaggttttaaatgtttcttaatgtccatcattattttttctaaatctctttctcttttttttttttatccgtgtggcctgacatcatcaaaggacttattggttttcatattgataaattagacttgaaagtgatattgtctctttggtttggagattgtttgactacacaaccggaaggaatcaggggttaggttgcaaacagagaaaggcattaggccttattcttgggggtgggaggaggtggtcagcccttggtttctgccaagggaagggagggatccaatttgcaatttctgtaagtcatgttgacagctgtgaggtaaacagaatgactggcaggctcagatggaagcaaagaagtctgcagggatgtccgcacacaaggaaaggacagtggcaggagggggcagtagcaggaggggagaaagatgcattcagattcgggcatgcttcagcatgcaacctgtcaggactgatgaacacaaagacaagttacctgctagtcaaatcacagaacacaaccagcccagtctcatttcatggagctgggcacagacagggagcaggaaagaaagagaggaaagagagagggagggaatggggagaggaagcaggaagagaagaagagaaggagagagaaggaggaagaaagaaaagagaggaaaggagaggacagaaggaagaaaagagagagggagaagaagaagggcaggaggagaaaggagtgaggcaggtggggagagaacatcacaggaccctggattctggagaccagcgagtccaacacactgcatgcaacacactctgagcatggaggcagagaggtctggcagctttctcactctgtggctcagaggtgcactcatgattccggagtagatcagatctgaatttcactacagccccatagctcatgttccccagtggcttgctcggaccaaaatgagaattacttgtgcctcccgggaccatgcactgactaaaggaggagaaggggtcctgccagggcaggtgttggaaggcagagggaaaggggctcgagctgaaagcacactcatgaagctctctgtgtggaatcctggtctgggaggacactaagaaaaatcaagccaggaataaaagccatgcttcctcctctactctccctgctcagagcaggaacccacatcagttgaggccctgccatctgcaaaccaccagaggccagagattcaaacacattcatttttctgcccatttctaagatcagaaaagtgaggttctgtgaggttcagtatctttcttccaggcctgtgggtcagtgtgaaagccagatctttaagagaggtgaaacccatgtgtggaagggactcagaccgggggaaacctgcaggcaggatcagacagggtgctctgctgttggacgaccttcttcagtcctgtctgggatttcagcgggccagtttgacttgcagtatttgagctgtgttaagagaggattcaaatggcctgtgaaatgtgaaggcaccacacttcaaaccctactgcttggctgggcaatcgtgggtgagattttaatacaaacttagcacaatcaccacacactcatgaagaaaagagcacccagtgtcatcagggaggggcagcttaaggcatctacaaacctcccttctgtgatataacctgaccccgtgaagcagggctttcataagtgttggaaactcgaaggagagaagaatcatgtggctcattctacatggagcaggacatggccactgagagctcgccacaaacacagaggcctgccagggttggaaggtgctgtgccttcggatctaacctgactccccagtaaggattttgaatgcttcaccctcgccttggatgtatgacctcaacatagtcaggaatggtcccttacctgccattagacaaaagtcactaagtgtgatcctcttggatagctggacaaatctacttcattccaaaacttcccagcttcttctcaacatcttgtgctatgtggtggtccaggtagctctaggaccaatcacatgaccatgaagcctgactcagccaatactctccctccttgaatgatgtcctaggcacagagagtccaccctcccccatggggcctgagcacagagcttgcccctccccccatgaggcccgggcagagtctgtccttctcccttgcctgttgtcctcatcctcaggtgggcacactaactgtacctgcctcatagagctatggtgatctttcaattaactaaatatgtaaatccagaacagtgcctatcacttaggggagtgatgccagttttagagtttttggattactactgtaatcacttaggagtagtggccctgggtttgaacaatggaatctgaagtcagggacagcttaggtcaggtctgccgttaatcttatttcctgggataagtttactttcttttcatctacaagtgttttgttgctgtgttagcttgattacatggaggccacaagagcttattttaggccctaatgtctgaacccagaattcttttaaagcttccagtttctccagaatgtaaaagtttcttgaaaagtatgggggatgatttcagaaataggaaaaaattgaaaagctgcatacagctgcaaccgctccactagaaatggaggaagaactgataaagtcctttttaagtgaaacaggctcatgaaaacatcctgcatgcccatgtggtacttggagcccagtgtgagccaaaatagagaccagcagtgaagagaaatattcaggcttgtctgcagaagttaacagggcagagaaggggaaattcagaatgttcttcccaaagttggctacttggctccatgtggggatggcacctacatgcagcctcaccaagccccatcaaatgggatggggtcagggggattaccatgaacagggctgggtgacatcagatttgactgttttgtgtgatactgagcaagtcagtgaagcagtcagtcagaactctcacttgagtggccctctcagttgtgttttctgcctggagagagatgtgggcatcctttgcaccagagttttgggaagggcggggctgtatccattgcaggtgaggggcagtcgtcactgatgtaaagcagaaaaagtggtcaggcagctggaaagagccagggcagatgcaggagattagcaagaggcatggtggacaggtcgagatggagatgaataattgctaaggcagcacagaaagggctgggcgaaggcagagtcagctgcgagaactgctgtggcttgccaaacaattccagtaagctgaagccacaggcaagggagaatctgaggtcaagtgctgagacagcaccatggatagctctcctgggtacaggggcttgaaagaatgtgttaagaaggattctgaggctgtgactgagccaagaaggcaacactgctatgactgactaatgacgcctgccatggacatgtgaggggggatgtggtggaaggtttgcagtgtgctggcctgtcccgatataggctgagtcttgatccaccagaaggctttctgcacatcagccagttttcgtggtgaagatttgggtctcggaattctcctgtatgcttatgattcttaccatcaacttgtttccttggtaacccactcctgctgtcttgatgatggcttcctgtggtcaggagacttctggctggaggcttgaccccacttttcctgatgaatgacctttagaggtggctccaggtattgcttcctaaacctgagtaaccatgacaacctctctaattccggagctcaactgtagacacctagactataattctgggcaactttgtgtcttatacaggtctgagggctagagatcagagtggacacatggttcaccatgtagaactgtcatcttgtaaagaccttctgtgacctccgggactttgcatgggtactcctatcatgggtgtgcagcctggggatgtgtgctgtgtgtcatatatttttctgaaccacagccatggtgtttttggctccagcacacatcacaggaagacttctgtgcagggcagtgtgacacaaacacattcagagcagtctgttgctggagaaggtttatctccttggctttgaaacgcttgcagcctttcagcccctaaaagcatttagaagcaggatgtggatgattttccatatttctaaaaagactctttctcctcttctccaacagttgccactatcaatactgatgggaaactttccagcccaggctagggacctcgctttcctttcctgccatctccttgttcttagcccacagcatccaaagacagatgattttcttggccatcccaagtaaacatagtgataggagaactggatttttttgaggacccattccttcaacacttgtctataacaatatactctggagaccctaaccctatcttcggcggctgaggactaactgccagcaactggcacgttgcatagggcaacctgtgctttcagtctgtcctgcccttgagtcatttcttcacctttaactgtctgattctttgtagtgctcagggctttctgctggtagctgggaaagtagctactaattgtccatgcttagatgctattgacagaaggtgtaacatctcccaggactttggattctgaaaaggaacttgataaaaactaaatgtctgatagtaagtattccagttcaatggcacttgacggtaagaaggttcccttgctcctgtcaaattacatgtgtagagactgcagtcacactctgtggatctggacactccaagcatcatattcactgagcatctccactgtctgagcccctggtcagggctcactctttcatccaataatcttaaaactccgttgaggcagaagccattatcattatttttcagatgaaataagtgcaccctagtggacttaaatgacttctgcacagtcacacagctactgggtgcagaattagagctcacactcaggtttctgatgcacacatcggcgatgactgtatcttgcaataatagtggctatgaactctcacccagagccacttctgtgcaggttcctccctgccctctacctcgtctttctccccagctctccctgtcctccacaggggagactagcaggagttaagctttaatcatttctgatccccaactactgacacataccaagcccttggtaaatatttgctgaataaaaaaatattagaacctggttagcacacatgtttcctcaggctactgtaacaaactgccacaaatctgatgacttaaagcaacaggagtttattctctaagtgtcctggagaccagaagtccaaaatcagtttcactgggccaaaatcaaggcgctatcagggctgtgctctccctggaggctccaggagaaaatctgttctgttaaaagaaaaatattttacaaattaaattcaacagtttaattgagcaaagagcgattctccaatcaggaagcctgcagaacaagaagaggttgagagtgattcctggaactgccacatggttggataacatctgtgaacagaaaaagaaaagtgaggcacagaaaacaaaagtgaagtacagaaaaaaatagctggattgattacagctctgtgtttgcctaatttaacatggtttgaacagttggtagcctgtaattggctgagacccaactgctgtgattggcgaaggcttggctgctgtgattggctgagactcagatgctgtgattggctgagactcggatgctgtgattggctgagactcggatgctgtgattggctgaaactagctacttgatacaagaacaagttgccgtttgtttacacatccagttaggtgacagttcaatgtgtacagggaaaccttttggctgaacttaaatatgtgaggaggcagctttaggggaaacttaatgtaacagattttttgcctcttccagcttctggcagctgccagcctcccctggcttgtgtccatatcactccattctctgcctttatggtcacgtggcctctgtctctctctcattaggatacccgtgattgtattgagagctcacataaataatccaggataatctcccatcttaaaatcctgaatcacatccacaaagactttgccatataaggtgacaccagtttagggcatagacaccttggagggacctcattcagcctatggcacaagtcattccagcctttagaagcatcagtttgaggctgggggtgctagcttagtgcccctcattttatgggtgagatcagtgttcacactggaaggcactgattgagaatcacacctttcaaagggaggagctgcctgcaagtcaaccacctggaccttcagtggagcagcatactcaccctcatgaatctattcagtctcttcaccacctccagcctggatgtccccttatccaccagtgggaataatatgaatgcctgtctcctagcttttctgtaaggattatgtgacagggctcatgtgaagtgcctgggatacatttggatgtcttagaacattagctacaatcactgcttttcttgttggctaagttcccttggaacttaagggtctatgagatgaatccgtgcttttcaaaggcttcctaagtactcactaattactcagcagtatccctggcaggccaatggctcaggagtgagtgaaaataaaaggcaagagaaacttcctttgtggtcatatttatcctttgatgactttggatttactctgacagagccacttgggcatgtgagatgctttcctcctcactgggagccaagtaggtggaagatagggcaggaagtctgtttcagttcttctaagtgaccaagagtaaatcccttgaacattagtgcactttcgaaaaggctcaattcttcccatttgccctgagctgtgcggtgttcattctttcccctctgtaggccaaagttggaaagttcttccttaatggcctggctcagagcgaatctaacacatcagttgttacttaaaactaaataactaaaagataatgaaagccttcactatggatatttaaatccctcccagctgcaatctgcagttctcactgtgtgccctttggaatggtgatgagcagttccttcaaatgtcgctgtcatggctggaccaagaagaggccccctgtgcagccacttttgccagtagagttgtcatggacccttgtcaggcctcgctttcaaaaccgtcatcgtggccacatggagtagccataaccttatttgctgtagccaatgcaatgtgaatggaagtagctgaagcagagatgtgcaatgcacctgtgcaggtgcgatcagcccctaggctcctgccatcacataagaagcatgccctcagggtggatccccaaacagagcagacccaaacccacccacctgcagcctggagaggcgcacggctgaagtcagccaaactcagccaagaagagccacacttttgagctgggaatcagaaaaagaagtgtgtgctgctgtagtcactgagatgttgatgttcttggttacacagcaaaacatgattagcacagagtcttcctccccttggtctgtggctgcctgagaagaggccccacacctacccaacaggtgccaggactagaatggacactgaaatagtcatcaaaaacagcactgagagagaaaagtttagattggactcaatcttaaatgaattttccttaaatgaatcccatgagcctgtgacaggcagtcctgacagagctggtgaagggagagctggaagtctcatcaatccataattgatggtgtgggatcagctgtagctatttctgtgatctcatattgcagatctcatgcagagatgcttgattcagccatacgggttcagaacacccatctgaccccaaatcagacctgtgatgcccatttctccttccagctctatctatgaagtgggctcaaagttgggtcataaactgggtggccttagttgtaaggtttcctgggactcgtgcaagctgtccgggagaggagatcatgccaggaagagccacgccaggacaaaggtcatggactggctattggagaacacccaaaattggggttgaagttatggtgggcgaccattatgagaggcatgagatacagcaggggccttttgtcaggcccagtacttccaggccggtgggtggaattgcctggttcaagaaggggcaggagggcgggttgtggctgtccactggagcagccttcagtgtgggcagctggagagtttgatgctcggtggagttggatgaaaaaagaggaaacctagttcgatttcctgggaaagggagttccaaagcttgtcaggaataacaaagaggcacagtccaagctcaaaggctagaagtttggcaggaaacaggggttccaggagaagcccaggaaataggctgggtaagcagtgggggctaagaggagaatgcagctgggggacacagttgggcccaggatggcttggacctgtctggcccagacacatccataacccccaggccccattgtttctcatcaacccctgaggatatagaataagcacatctgagtgtcagagcagggcagatcggactcaggttacacgggcaggtgttggcccacgttgtctgggctccactgaaggctgtgtttccagttgctgtggagccccgacagctgatgcccatggtgggctggagtctgcacaggactttctgatccagcagcacctcccacctggcgtctctcctcactttcactagtaaccccttctgccccttcttggccttcttcatagcacttgccatgcttaacaattctacacttgtccaagaggggaattatatgtgttttggttcctatttcagccccagggcctgacacgtggcctggctcagagtgaactcttgagaaacgttagtacactgaaaaacaatgaaaaaaaaaaaagaatgaagaaagaagagtcaaggcagatcaaccaggatcgacgcatctgtgtccctcaagttaatgacatttgataaacaacttctttgtctgttccttccctttgtctgtagcccaggagacacagtgacagaaggacaatgcctgggcctgagctgggggctgcattccattgctgcctcttcctggcacaacctataattgttctaacccagcagaacttccgtgtttgcatttgtcttaatgggagtaataacaacaacttcacagtgcaataaataaataatggatataaagtgaggtgcttgtcacacggccagagataagtaaatttttgcttcctcttgcactttgtcaaggtttagtttcttgcttgaaggtaacagaattcaactttaagcaaacttaaacagcagagggaatttataggtagagtcctagggtgtgtcataaagtccagggagcctctgaaagccaggttcaggagggaccatgagctgctctggagctggagcagtagggacgcctaggccttcacttaagtgtggtggtgacttgcatttggtttgaccaaggagaatactgactggttcttgagtcgggtgcactccccctcttggtctgatcatggtcaaaggagcagggtctcttagaatgaacagggaatgaaagccagaagcacctctttcatgggagaagttggttatgctcaaagaacaggggtaggacataaacaggtggtctgttttagttatacttttctgagtcagttcttctacgagattgtcctggagtcacccagctggtgacattagttatctccctagcaacgctttattcttcactttgggcacttaatgccattgcttgtaacttggtatgtgtctgttcttctcctccctatgcctctgcatccctcaaatgtatgtatctgttcttctccccatgcctctgcattcttcaaatgtaggggccttgtctgattatctccttgtatctccatgataagcaaagtgaccagcacaaaatgtaggggccttgtctgattatccctttgtatctctatagtaagcaaagtgaccagtacataatgggcttgatgactgtgtgtgcttggctgagtaagtggtcatatgcagacaggaatagaggagtaaacgctccaagagaaacataaagaagccctaccccttagtgttttacaaccctgaccactggagcccctagcattaaaaataactaatctattcattcatctttttcatacagggtgggatcacatgcctactatgtgctaggtgctgccaggccaggatcttgcttccttgatctacagactaaggtctagtctgaaaggggtgtccttcaggagataggttaacatccaacacattggatgtggtgattgaattcaactttctttctacttccccgagtaattgaataagtatttcttacttaacagcagtactagtaatagaagaacttgttttggtccagcttttaaaagacaattcattccctgtgttttactctggcatttagatcaattatgttgtgtcattgcaaattgtacaattgcatagttttccaaggtttgagccaaatattttttaaaaattgctgatttgataattgaatgccaggaactgaggagtcctagtaatcctatttcatgagacttcagatggcagatttttctaaggggctatcatttgacaataaatgaatgtttcattggatctgttggaattgtttttctttgaaagttaattcatgggtttaagcccctgctgctttccctccacttcagaccccagaagttatgttggattcggtttttccactcctgggaagaagcactctcaattttaaagtcaaggcattatttcttcttttaaacacagaaagcgaatggtaatttacatttttgccacaagtgagaatcaataggaataaactaaatgttgataaactgacagtaaattttgtgttaaagttattctgtcactattaaaacaactttgcactggaaaacataaagtatccaagcctgcttctttttcgtcaggtaaattgtgggtagtgccattctttggtctgtaagcccacagactcagactacgagatcaagtttaaaatgtgtccaaactccatataatcttctcccactatcccctctcttgtcccagtgaagaggagggtgtattaccacatgcgtaatagatgagcaacccaagtcattgctttctgcctgggatggatggatgacccaggagctgaatgccaagccctcaaaaatattataccatcaacaatgggacaaatcaaaattgtccaccacatgaaaagatgaggtgaggatcagcattatttccctggaattcctgtcaatgatgcataatctgaatataatcccaaggaaacatcagacaaatttgaaatgaggggcatcctaccatgtaactggtctgacctcttcaaactcatcaagttcatgcaagtcaaaaacgacgaaggacatttcacaagttgaaaacaccaaaagatatgtgacaactaaatgtagttggtgattctgatctgtatccctttgctacagagtactttagttggacatctgaatggagttcaactctaaggtgataggaaggcgtcaatgctgattttctgatttgatggttgtattgtggttatgagagtggtggaagctggtatggtgtcatgtctgcaacttactctcaaatggttcagggaaagaagtcttcttagatttgcccttgaaacttttctggaaacttcagattgcttgcacattaaaaaataataatagtaagacctgggttgaggccgtctgagaccatcctggccacatggtagtccttcctccccaccaaccaataggcacagcatggtgcagcaggctgcccatgttcactaagcattgatccagttcttcagtctctttagttaggctaaatataatcctttatatatatttattcattgctattatttaatagctaagtaccattccccaaacaaccccatgattttatcaactggagagctgatagtttggagcacaaaagcaatatcagctgtacaatgatgaaccagcacaccggtatcacaatgttcaagcctctcattttacaggtgaggacaggaaggcaggcacagagcaacagggaggagcccgagctcaccctcaatgtcctccctcctgggccagtgtgctcaccgctgctgtctccctgcatttcttgcaaggaacagacactttaacattggccttggcttggcttttctccctgtggctttgggggataaaaaataaaactaagctctaaggtgggtagccagagagcactctcaaggcttcaactaaacaggagggcactaatggaaatagaggggtgagacagaaagagcaaaagagcaaagagaaattgaatatattttgattgctttttctttcacctagttgtaatggaagactgtgcttgtgggaagcccagagagagtggttcctggaacgggtgtagctttgtggttaagagtttgaactgtggatttaggtttcaacataaacacaggtccggtgaatagcaagtagcccgcatgcagctggggtggacctcgtcagtccagattgaagacctcatacccagtctgagagactgacgctccatgctgccaagggcaggcagaggaggaggcaaattcatgtgtgcatcccagtgtccctgcttatgacattgttataaacacttcaaagcatgacagaacatgaagatggcaatgcactttgtgaaacaagtgtcgcacatgtacctgttctgcagtaacataaaaataaattttaaataacaaagagacctgcatgatgttttcttgtaggcacgggcagttggaggacagtgaggaagcagctggaggagatgggaaggtgcaggtttgcccacgtgatctgcagcacacaagatctgtgccagggactgtggggcactgatgacaatgtggcccttcatcaccaaggagctggctgggcctcgtgagagctggtggaaagaaagcaggatgtctctggccctcctgtcttcctagacttgaagaaaacaagaaacagagtcaagaaattaggaaaatggaaaaagatctgaacacaacatctgaagaaaggctgcaaaacgcagggaaaattagatgcaggtgagaaagactgtgtgatgacaagactggcctccagaggtcttggagccagcaaggcaccttgttctcccatcagtgcacactctcggggcaaacagtcctttgctggaaacaaaagctccaggtcgttcaggccagggctgcagaaaattctaagaattattctggatgccactgggaggcaggaaggtggcattgagtgagggaacttgcagcttcaccgtctttgagataagcatgcacgtggggtggggaacccaaggggaagaatgactgtcattggaaggacccctaaggctgctggtgttggtcagtaaaaaagagaaggtgaaaccaccgcacaaaaacctgggacctacaggcttcagaattagcctataaatttactcttgccctgaataaagatggtaaaggagagagcaagaaactaaaatccagcatcctccctccacaggaatggctgagggctgccagccacatcacactcagccaccaggggctcaagtcctcagtgccaaaggaggctctgggaggcaaagccaagagtcttccacaatgagggatgtggcagaagcaagtccagtaaaagaaaagcaactaaggcttttacttttttatgcgaagaaacattttatagttttatttgaagaaaggaagtggattctccacacagcatgttaagcacacgcacagcagccagaaagctgaagaactgacaggaaatatgtgcggctagatcaggtcctatggaaaacctggccagcctctggatgaggaactcactggggaaaatgaaagagttttaacgtgtattccaactactgacagtcgaattgtgtacacttggaccatgtctactctgctaaatgtaacaagggaggaaacagtcctgcgggttgaaatgagattccttggtccactgctcatgaacaaagtctccatggatttggaaatgatgccattgtctctggattaccgctgagtcctatggagagttgaggaaacaaggtcctgagcccgaaatgcttccatcttgataatactttgcaattcacactctttaatatgagaaatagaaatgactctaatttggaagatgcaaaaagcaaggagataaattaggataaaaactagatttgggttaacagtgcagataaaagaggaataaaataaaaaggcatggcagtttattagctgtccagcagctgcagctcactttgatgagccaagaaaagaacttaaggaatatgaaccagttattagagaaaagcaccacatcagctttagttagcaagaatgaaagactggctaaaagacagaggaagggaaatgcaaatggaccctcattagtacttggctcaagtttggagtatttaaaactcttttgagacccagataaaaatatttaaaaaacaaataggaaagggagagcacaacattcaattgaggtcacgcttaaagagagataattcacagtgatttaaatgaatgctacacaaaacatgggcctgaatttcatatatatatatatatatatatatatatatatatgtgcatgctttaagttaaagtgaaaaaagaccatagcatttttctttatttttttgaaagagaaccatatttaattttatcttaatgtatggcagtttattatattatttttattttactttaagcgatacatgtgcagaacgttcaggtttgttaaataggtatacatgtgccatggtggtttgctgcacctatcaacccatcatctgggttttaagccctgcatgcattgggtatttgtcctaatgctttccctcccttcacccacaaacccccagctggccccggtgtgtgtgatatttccctccctgtgtccatacacatggacacactgaacactctcattgttcaactcccacttatgagtgagaacatgcagtgtttggttttctgttcctgtgttagtttgctgagaatgatggtttccagcttcatctatgtccatgcaaaggacataaactcattcttttttatggctgcatattattccatggtgtatatgtgccacattttctttatccagtctatcatcgatgggcatttgggttggttccaagtctttgctattgtaaatagtgctgcaataaacatatgtgtgcatgtgtctttatagtagaatgatttataatccttttggtatatacccagtaatgggattactaggacctcagcattttcaatatttcaaggacaacagctgattttcttatggctccaagtaagttcactagtattcatacaccagtcccaaagtatacagatagaccagcataaaaataatctaaaaattagtgaagcataagggaggtatattagctaaaatataggtctagatgctttaaaacagagagagtaagagcagcctaagtaaaacagaagtgtgtttctctctcagacataagtccagatgagtacgcgatccatgagagcagcatgactctgttccccaaatggtccgggaactcagacactgtgtagccttgctctcctgtgcccatggtgtgcctccatcttcatggttcaagatggctcatgactgaaatagctgagtccaggttgtggaaagggccaggaaggctaaaagagaagcagtgtccttttaaacgcacaacaaggcagttgcacttatcatttctgttcatagaccattggccacaactcagtcacatggagctaccaacatctaggacatgcagttctgagccaggtaaccatgtaataagactgggatagaggatagaggcacgttctcttacttaaagaaaaaggtggcagatggatactagaagtcagtcggcagtgtgggcacccaggttccttctaatgtcttgctccaccagcccccgaagtgttgctgtaactgcacagtctcattctaactggacctactctgtcaatagcaggattttaagttattgtacagttacagagccaagaagttgcaagttaggcagccaagacatgtgtagtgaaaaagctctgacctgtaacaacacccagagccaacatatcctccttgcagaatcaaaaaggccagggcatgaccagaatttgaatgctggaaccctttcagaagtgagggatccattaactgggaagatccactgctgaaatctaccattccataccttaccataaatggcctagtttgaaggcctccaaaagaaacctgccctaccagcacttctgcacctaaacctgtcctccctgacccagaaaacttgtcccggacctcagaccaaggagagagatttgagctgtgcctcctgtctccttaccagttgacctcgcactaaagcctctttttcttcctccaaagccagtaccatggtaaaggcttctatgcatgtcaaacggtgaatgcattgctcagtaatggtgcttccatcacacgctcaaagctggcccagcattgccttgtctgtgctccagctagtggaaagggaaagagaatgtgcagagcaaacagctgcctttgaaggacgaaactaggaagttgcacatgttcttgctcatcaatttcttctgccaaatcttagtctcatggcctcatctacctgcaagtgagtctgggaaacatctggggacatgggagttctatgaataacagggagaaatggagaataattattgcgagataagtcaaaatctcaaacacaaataattgaaaatgtaactgctgagagggtgttcaatctacttaagatactaacaaattgctcttaggtcctaatagacccatggtgcttctaatgagaagaatctttattactcaaatgtgtcgagctggatttcaaagttggaaacattttgtgtgttcttaagaaagaatgattttttttttttttaagaaacagtttgtcatttggaaggcattttcagcaattttgttcgaattagagcggcttcactgaaaggggcagtgcaattccagaacagggtttccctgactatgttttgtttatgccttgtgaaataattttgcaaaacagatgcataacctcctccccttgacagtttcacagaacatgttgcacgttaaagctcttacaagtgctgcaggaaagaatctggcatacctttcctaagccagcctaagccaaacttacttgatcattgaggcccttcttacaatgcccttttcaccctccaatgcaactagcacttcatgggggcacatttggggaaagactttctagcatggtaggcattgtaacaaacaagccatatacacggtttctaagtcatggcctgtcactaagaacattgagtcacatggagtgagaattgactaactgcaagacccttgcgtaccacccaaactccttggtatgtgataagagggaatttggccagattacatctaatactaggtattagagatcatgtcccttctttttctgttactatgtatgaataaaccgaaaggatcatacttttaggaaaaatagtttcttggggcaagaaataagtctgcccttcattgtagcccagggtcttccttgcaacaggcttacggtcttaataaattgctctgaatgagtgaatgaatgagtgaaggggatcctaagagatcaggtgatctcccaccttcagagagatagtacatgattgatcccctacagagggagcccctgaggtagaaatgccagtgacttactcggccagaaggtgacaggaaggggtgggggttcctggtgcctgccttgcccccagggccctgtccttccttccattccatagtggtggaatctagttataccatggttatgaaacagggccaagaaataaaggctatacatgaaagtaatttggaaagaccagtcttttttttcattgctgtttggatcagaatttagctgtgatgagaaatcttcatctcgtcatgggaaaatgctcattagaatgtcaaggggtaaaagcgagattcaaatctatggatggggcatatcatttcacatttgtgaaaaaatgtccaggctatagctgtgtagacataggcatgaaaaaaactggaaagaaatatatagatacactataatttttatccctggaagtagggttatgagtgactctattattattattttattcttttcagtaaataaactagatttaccaatccatgcttatcaacactgtcacagtcacattaactttttgcctccaatctgctggcccagtagccccagtggtagccttcatacctgcttggccctgtcaccagcagcaggctgcctcatgcaagcaaggaggttctttgttttctttctttttgagacgaagtcttgctctttagcccaggctggaatgcagtggtgcggtcttggctcactgcaagctccacctcccgggttcaggccattctcctgcctcagcctcctgagtagctgggactacaggtgcacgccaccacacccggctaattttttgtattttttttagtagagacagagtttcaccatgttgcccaggctggtctcgaactcctgagctcaggcaatccgcctgcctcggcctcccaaaatgttaggattacaggcgtgagccactgtgcctggcctcatgtgaggaggttctgtgcagtggagccagaattgaaggagcagttggcggaagcccctgctgaccacactcctgtggctggatggccagtccttcctcgaaggagactctcaccatgtgtgagctgatgacccgcagcccccaaggctagcccccacccacacactatggagggctacattgaagtctctcacctcctcccagggtaacagatcggcaagtccagaggttgcagttacaggcatattcttttgaaagccttttgccccttgctggatagctggccttgacagcagagactgactgacatggctgtactgagctttctagattacagcgaactctgatgcacacaatttaatggtgtcttttgtagtgctgaaagaagagaatgtttgcctgcaggccgtttgaacgttcacacacttaaaaaaaaatgttggtctgtgggcttctaatcaggcagggaatagcagaaacgtccttcccaggagtctcttaactaaagggggtggtaagaggaacagttggtatcagtttacatttccatgggagaataagaacaccctgaagctaatcaagaagagctgtgcatgggtgtgtgagtgtgaatgcctgtttgtgcctgaggcctgtgtctgtgtgcatgggcatgttgcacgcatgtgcatgtggacatttctgaggctctcagaggatgagcaaggctgtggctgtttccatttcacaggttccaaacgcatttgaaaatgaacaaaatgaggctataaaatgggtggcatattttaaatatttactttgcacacatgtgaggtttttacagtgacctgcatggcctcatttggagctaatgtagaaagtttaaaatgcatagcctcctaggcagaacagccccatacacacagctgcttctggccccttccacctcaggaaagggcccgtgtgcctgtggggcaagagagaccatgtgctgcaggctgcttcccccagaagcaagtaggacagccacaggcgtgggagaagccttctcagaaactctgagccctgacatatttgctggggtatttcccaccctggactgacccacatctgcttggagggaaagaaaagactagattgcatgatatagacaatgtgagtttgacttcactgatccctggaggctggaaattttccctctggcaagcaaggttaggtctaaaggctaaaactcccacagtaccagaaccaggaggctgccggctgcagacagcccaggagcccggggcatgggagaaagctttctgattcatgaagcatgagatttcattaggctcattggagttacagcccgccatggtgggtccatgtctgccctgtggcctggccccaccattccaacaggcggctaccagcctgctggaagcccaagtggagttctggtcagcagcactgaaggctcccaggaaggatgggcgctggcagggcgtgggacagacccagtgtggccggacatcctgggcccagtgaggaagggaggggctccactagcagtctcacaatgacatggggcaggggtgaggaagggggagaagggagctattcttttatgcaagtaggtggcatgtgggcagccagcagaaacacaggcaggtgggctaggggagaccaggacaacgggggcatatatcaaggtgtcctaatcgaaggggacatgaggttgggggccataggccagggctatgccaggtcctctcagagaccctgactagagcaggcccaggaccaggcaggtaaaattcaaagggatgaaaaaaaaaatgtgggtctctgtatccagagctggtctcaggtcaagaagagggcaaggccaccagccgcccagacttacagaacagttacaggaagaacacagagagttcccagatacctttcacttggagaccccaaatgtgagcatttttactctctgctctctctctctttcctcccctttacgcctaaagacttcagtgtgtgtaaaaacaagaacattctctcacttaactacaaaaattatcaaaatcagaaaattaaggccaatacaaacctattatctaatctacagaccttattcagatttcactgactgcaccagtaaagtccctggtggaggcgaaagaagccgcaaggtcatgttgcactttgctgacctctccctggcctcccttcacctggagaacccctaccttcctttatattccatggcccggacatttgaccactccaggttaggttcgtagcgcgaccctcagtttgggcgggctgtttttaaatgtgcatcacaggcaaatcctcactccctttgccaaaagaagctgccctattaagcatgtgtcttatttaaatctcaagatgctagttctgttttgatagatcaataggaaccacatttgttggcaggcctgctgttctgcgattcatgtttgttaaagcaacagcagccttttctcccctttctctctctactcagagaagtgttctctttttcttgcctttgtccctccattcaggctgcttgggtgtgaagacccatgtcatcagcaaaagtgggatcccagagcctacctgccattcccagcaacaaggatcattctgaatgataattaagaatgtattttccaacatggaagaatatcaggccttcagtaagcgtgacttgacagcccccagggcggcccaggtctgagagctgacagtcatcagaaccccagcaccacagggagctaagatcacagagaaaccctcagagccgtgcatcgtaagtaacgtgacctctgaagcaatcaaggagttggtgcaaatctggtttgcattgctgtgagggggctggagaataagtcaatgggtaaaaatattagtctgaatcaccagccctttttacataggccttagatttgaggtcagcttgagcctaaaatgtaagctcattgggcttcatccctcgagcccttcctcttcctccctggctcatccacctcctcagttcaaatccatgaaacacaattcagttccagcaatatgtgttgaagacacttcggtgctgggctgggccaggtggtgcctgcctacggcacagcaatacctccagcctcaaagccactgcaccacatgcatctcttctcctgtagctgcccaatgcatttatgtgtaggtccttttcccccaggcttctgcttcctgataaaggagaggaagaggccagtcgagttgtattctggaaatactttgcctttgttcttctccttcctggtagcttcttgaatcaatcccttcgctttcttccaccaagccagaaagcagcctcagactctgagcagccacttccagtcccttggggcagacacccacgcagaagcctgcttgcatttctgtcctgggagtggagagaagagagccctgtggctgtgtagcctggcaaggctttgtggaagagggggcccaacttcaccttaaagaatgggtgagtttgaggggctctcacagaaatgggaggggactggtatgggtgaccttgatttgggtccacacagacatctcttggagccaactatatgctttgagccaactataatgcttcttttttctcttcctcctttaagacacctgggtatacagtgattacaggtttagtggtaggagactaaattctttgcaacctggatttctatgttcaaccttgcagcagaatctttgcaggtcagaaagaaaggaaatagcggatgctgcctggcgctgtccacatccctcaaattctcagaggtaacctgagacatccctgtacatgccaaaggtgttctctggcctccacgtggatgggccacaagtgactggggacctacccccacctcctgtaacagtgctcaaacaatgaggatgggtgagaccctgacttcctcacccctccttttggtgggacaactctaagtcatggcatctgcacagccactctgtagcctcaggtgaccatggaagtagcagctcatccaccccattttatttatttatttttatttttattttttttaaattttagattcagggagtacacgtccttgtttgttacatgggtattacaggtgtaatggtggaggtttggtttctagtgtatccattaaccaaatattgaacattgtacccaaaaggtaatttttcaacccccacttccttcccagcctctccacttttggagtcctcatagttttatctctccatttctatgtccatgtgtacccattctttagctcccatttataagtaagaatatgcgatattctgcttctgaattagttcacttagtgagcaaagctggatggcctccagctgcatccatgttgctacacaggacatgattcaattctttgttatggctgcatagcattgcgtattctatatgtacaacattttctttgtccagttaactgttcatcgaccctattttgttagcattcctcccttctctgtctccttcctccactccctcagggtgctcctgggtcacctttcaagtatattccctgcccccagtgctagcctcaggcttcactctttgggaacacactaagaccacagtgcatttgactatgagtgaggatgatcttcctacattttctatgtggcaaaggcaaatggaagcttgaggacaaaggcagatctctgagttaaaaggacacctacaagtccttctctgtgagctcatcttagggcagagcagactcagagatggggaagagcctccatttacatcctggctgctcccattccatcacttccatcactctggaatctgtagggaagcaggccagtcctctgccctgaggctgaggcaggggcggtccgggcagaacagttgccaagtttccgcctctgcaaggcacaccatggtgaacaaaaatgccaaatcctcctccagatccccagaaagagccagctctcctgtttgtctctcgtggactgctgtgacctgtgaccaggtaattaggactctgggtgacatttctctcatttaaattctcagttctctgttcaaatctagaaagaacagctctcattgaaagggtatgttgggagggtttctgtcagggccctgggcctcttgctgtctgccctcactgtggatgtgagaagcagagatgtgttcgggtcatatgtacaggggaaatggaggggtatcagcgagtatttccactggaaggcactacagtggggctgtttgaggctgagtttttgttttcttttgagacaaggtcttgctctgtcacccaggctggagtgcagtgaagcgatcaaggctcactgcagccttgacctccaggctcaagtgatcctcccacctcagcctctcgagtagctgggactataggtgcataccatcatgcccagctaatttttgtattttttggtagagacagggttttaccatgttgcctaggctggtctcaaactcctggcctcaagtgatcctcctgcctcggcctcccaatatgctgagattacaggcatgagccactgcacctgaccttggattttatttttttaagattctttatgagcaggctcaaagccattcttcaatcacgaggaatgaatgacctccagcccacggttgaaatttctgacaggatggagtcattttatggtttccttctgggcctgtcctggcaagtgggaggcacaagtgagtacagcctggaaaagagcattccacctcattttcagctcaattaacctttcctgaaatgccacagtccctcagagaggggccctcctgggccacatgagatgggaggtggaggttcaccaccaaggcagagcaggtagatatgctcctttaactttctggaggctgagataagaacaaaagccatgagctccctatggtttgggttgaagaaaaacctcattcatccactccaaggtggtttacatccaggccaggtgggacgccctggctttccgctctcccctcagaaaagggcttgaccgaggaaagagatgcaagcaaagtaggctgcaggcacattgagctctctgaagacatgagcctgttcctccaagtgaaccttggtgggtgtggccccggatcccatggaggtgtcagagctaccatccactcccacattggacagggacggctggagccagggctcctgggctcagtaaacaagtcctcctttcttacaggacacttggaggcagcttttaacaactcagaccagatgagtgagcacattctcacacatgtcccatatttcccaagtcagtaaccagccccttgcagaaggctggtgatgctttacaccttggggtccttcagagaaatgggtttgtcgtacagcgtatccttttcaacatggataagcattttattgtgcattaattctaatgtaacgttaattggaaataatccttctggtgagaagagcataattctgctggcttctggagactggaagaagctttaggaccctcaaggaggaagccctgtgggaggaggaagtggccatcatgagcttcagcgaagacggctctgcaggttgcattgaacttgcggacaagtctccacccgactaccccaacctggcaattatgatctgcttatcaggggagcagtgacttgacagtctgtctcagtttacttgtctataaaatggttatgaataatcatattggcctcatagggttatagtgagaattatagccactggcagagagcacccagccagccccattcctggagaaaagcagaagtttagttcttggaaaagttgcatatagattcttaaagaaatgatgtcacagggacttccttgctatccctaaaaaccagggacctgtttttaagtcagtgacccagcctgctacagtggaatcccagttttaggataatgtgaggtcagctttcctcactccattgcatgccagggcccacccttgggttttaggcttgaaaaagttatagttaccaatatcctccttcagtgactttccatggcttggagaagacagtccagatccccatcctgcagcataagggccctgtgtgacctgccaccactcagtcatctgcagaaggctggtgcctgtgcactctatgttctgctgatcgaggtgccctcacctttcccaacacatcatgtggggacacgccctatctgtgtgcacagggaatgctgtggaatgtatgtagagcaccctccctcatctccttggaatgcttctatcatctctcaagatgcaattcaccttgtctgggaaacccttttgaatcccgcagcagttatctgctcactcctctgacctgtgcacacacctctgagattgtaccatgcactgtgtgggagcagtcttctcctagcattcttctctaatagggaactctgccttcccaccttctatacctggcacacggacagtgctataaatgttggttgaatatagaaattggtaggaggagatctggagtcagggctcagtgctcctggggatggctcaactcctgttctcaggcagaatgaaatccctagcaaactgcagagcaaccaaggagaaaacctatctcagaagttagcgcccccaacacactgaagtcttggatcaagcatttacccacctgctagagatcagtggctctggaggaagcagcacgtagacctttgttcctgggcaacactaacccgcggcatacctgaggaaatgtgaacctgttatctgctagtttttgagatcccctttacctccacctggtggggaacgaggcatcccctgctgtctgttttttgccctcttgatacctggattcttctaccagaattaaatgtctaggatttcagtagagacttttcaaggggctgagaccttctgagcctgaagagtgttattcctctctcttgctctcagcagcttgatttgtaggtcagtctaccatttactctcccacaaggactggggtatattgtattattgtccttgttcttcaccctctatggccttcgccatgtgactttgatgtacttcccacttgaattggggcatatttcccatacttcttgccattgggtgtagttatatgacttgcttgggacaatagaatgaggtatttctactctcctccctgaacctttgccatggccatgagaacatgccagcctagctgctgatcccaggagaaaggtgagagacatgttgggcagagccaagcccctagacagcccagcctagattagctgactctcagttagcagagacccttgagaaataactgatgactgttgttataagcctttggagtggtttgttacatggcatcattgaagtgatagttaaccaactaatatttaaagaaattttggtcataataatctgatgcccagtacactgccctgtccccttggcatgggaagctcataccaagaacatcaactttggcacacacacacagccccctccctatgacaaaattggatagcacatgctccagggttgtcttcgtaaaagacgtgtgtccctgtgagatggagtaacactgacaacaggaactgaagtgtttccatcaacttctaatttccatttcccctcctcccgctctctcccctctacaagagtctatagtctcctggtgatgaacaacaacaacaacattcctcaaagaaacctttgtttaactctcaacacatctgttcttcatttataggaataatggctaacaacattagagagtttacatctatgtccagtactgtgcacttttataaatgattgttcattatttgtagaatccctgtaatgctggtgctaagtaaaggtgacactttaagttcaccacaatgtctgctctgagagcagaaaataatgtcttcaaggccacatgtagatccttcatccgcagtgcacttaccctggtgtggtgctttctttaagaaacactctgattggccaaagaaatgcacagtccacagttcagctctaggagctttgtagtatggatggagtgcagggtgatagtcctccacttcttttctgtaaccaaaagaacaggatttttctaagtagatatttggcatagatgatggcatctttttttctacaaacagatttttacaactttttctcttgtctagttttcaaaagtatttgtatactcattcttgattaaaagtaaactctcagaaaattaggaatagaggggaactttctcaacccaataaagaatatctaccaaaacacttcgttgacattgtatttaatggtgagaccctagaatcttttccagtaaaataaggaagaaagcaaggatgctccctctaaccactcctcttcagcatcacactgaaattcttagctaatgcaataaaacaagcaataaaagtgtactgatgaggaaggaagaaataaaattgtctttgttttcagatgacgtaattgtctatttagaaaattctcccccaaacaaaacaaaaaaattctggatactaatacatgattacaccaaggttgcaggatacaaggctgatgtgtaaaagtaaattgcattttttttttaacaataagaaagtttattaaaatcaggtgagttccaacaaagggtggctctggcttacatagtacatcagttccatgatggcttcttatactgaggttttggtttttttctttttcctttttttattatactttaataataaatactttaatactgggatacatgtgcagaatgtgcaggtttgttacataggtatacacgtgtcatcgtgatttgctgtacccatcaacccatcatctacattaggtatttctcctaatgctatccctcctctagcctccaaccccctggctggctgtggtgtgtgatgttcccatcaatgtgtccatgtgttttcattattcaactcccacttatgagtgagaacatgtggtgtttggttttctgttcttgtgttagtttgctgagaatgacggtttccagcttaatccatgtccctgcaaaggacatgaactcatccttttttatagctgcatagtattccatggtgtatttatgccacattttctttatccaatctatcattgatgggcatttgggttgactccaagtctttgctactgggaacagtgctgtgacaaacatacgtgtgcatatgtctttatagtagaatgatttatagtcctttgggtatatatccagtaatgggatttctgggtcaaatggtatttctggttctagatccttgaggaatcgccacactgtcttccacaatggttgaactaatttacactgccaccaacagtgtaaaaggtttcccatttctccacatcctctccagcatctattgtttcctgactttttaatgatcaccattctaactggtgtgagatggtacctcattgtggttttgatttgcatctctctaatgaccagtgatgatgagctttttttcataagttttttggccccataaatgtcttcttttgagaagtgtctgttcatatcctttacccacttattgatgggttgtttgttttttttcttgtaaatttgcttaagttctttgtagattctggatattagtcctatgtagattctggatattagtcctttgtcagatgaatagattgcaaaaattttctcccattctgtaggttgccttttcactctgatggtggtttcttttgctgtgcagtagctctttagcttaattcgatcccatttgtgcattttggcttttgctgccattgcttttggtgttttagtcatgaagtctttgcccattcctatgtcctgaatagtattgcctaggttttcttctagggtttttcttgttttaggtcttacgtttaagtctttaatccatcttgagttaatttacgtgtaaggtgtaaggaaggggtccagtttcagttttccacatatggttagccagttttcccaataccatttattaaatagggaatcctttccccatttcttgtttttgtcaggtttgtcaaagatcagatggttgtagatgtgtggtgttacttctgaggcgtctgttccattggtctatatatctgttttggtaccagtaccatgttgttttggttactgtagacttgtagtgtagtttgaagtcaggtagcatgatgcctccagctttgttctttttgcttaggaatgtcttggctatatgggctcttttttggttccatatgaaatttaaagtagtttttttctaattctgtgaagaaagtcagtggtagcttgatggggatactattgaatctataaattactttgggcagtatgactattttcacaatattcactcttcctatccatgagcatagaatgtttttccatttgtttgtgttctctcatagtaaattgctttcttacatacatatcagcaataaataagtagaatttgaaattttaaaaaatcatttatattagcgctcaaaatgaagtacttagatataaatctaacaaaatatgtacaagaactatactaggaaaatgacaaaactctgatgaaataaatattaaaatataaaaaaataaaaaatataaaaaagaatgttcataaatagactaaattgtcaatatttcagttcttctcaatttaaactatatatccaatgcaatcctaatcaaaatccagcaaattattttataaatattggaaaactaattataaagtttatatggagaggcaagagacacagaatagccaatacatattgaaggataagaacaacactggggaattgatactactttccttcaagtccactataaagccacagtaataaagatagtgtggtattgttgaaagaatagtcaaataatagattaatggaaccaaatacagagcctagaaatagacccacatacatgctgtcaactgacctttgacaaagaagcaaaagcaatacaatggagcaaaaacagtcttttccacaagtggtgctgaaacaactggacatccacacgcaaaaccatgaatctagatacagactttacaccatttacaaaaagtaactcaaaatggattattgacataaatgtaaaatgcaaagctataaaactcctagaagacagcatatgagaacatctcgatgagcttggatatggcaattactttttagatataacacaaagaaagaaaaaagttgaaccccattaaaattaaaaacgtctgctctgtgaaacacacagttaagagaatgtgaagacatgccacagactgggagaaatatttaaagaactgctattcaaaatatacaaagaactcttaaaagtcaatagaaaaaaacgaacaacccaaataaaaagtaggctgaagacctgaatgaacacttcaccaaataaggtacaaagatgatacacaaatgggcatatgaaaaggttttcaacaccctatgtcagcaaagaattaaatattaaaacaatgacatactactacatacttattggaaaggctcaaattcagaacactgacaacatatcaaattctggtgagcctgtgtagcaacagaaactctcattcattgctggggggagggcagaaaggtccagccaccttggaagacagcttggaagttttttacaaaattaaacatgctttaaccatatgatccagcaattgtactttttagtgttttcccaaaggagctgaaaagttaatatccacgcaaatatctgtgtgcagatgtgtggatattgacttttattcatagttatcaaaacttggctttattcatagttgcccaaacttggaagcaacccagatgtccttcagtagatgaatgggtaaataaactatggaacatccagacaacagaatattgtttagcactaaaaagaaacgagctatcaggccgtgaaaatacatttaagtaacttaaatgcatattactaagtgaaagaagacaatctgaaaaggctgtatactgtataattccagctatatgacattccggaaaaggcaaaaccacagagacagtgaaatgacgaatggttaccagagacttaggggagggagagaaagatgaatgatggagcacagagcattttttagggcagtgaaacaactctgtatgatactggagtggcagatacatgtcactatgcatttgtcagaatgctacagcaccgaaagtgagccctaaggtaacctgtggactgggtggtagtgatgtgtcaacataggcttatcagttacagcaaatgcgctgctctggcgggggacgtagataatggcagaggctgtgagtgagggggcgggagatacatagaaaacctctgtatcttcctctcaatttagctgtaaacgtaaacctattatttaaaaagtctttaatgaatagtatttgtaacagctaaaaaaccctctctgccactgagcagtatttccttttacctacagcagccattctgaggtctggcctcaaggcccaacctgtccagctcatctcagattgtattatccttcgcctcactgggtttccttggtcatctcagcatttgcggtgcccgcagtgtctttcctggtttccctccagggttcttccttgcttggaaagcttgattccacttgcaccatcctgattctgcttatccttcaatggtaactctcacatgacatttgttccaacaatgctgtgactctgttttatatcatggctctccttccctgtcctccctccctccctccctccctctctgccttccttccttccttctctccttccctccctttcttctctctttctcttcttccttctttccttcttcctcccttccttcttccctccattctttcctttcttccttccctgtttccttccctccttcttcctcccttccttcctcccttcctccctctccctccctcccttccttcctttcttctctccttccctccttcctttttacttctttctcccttccttcttccctccattctttcctttctttcttctttccctcctcttcctccattcctttctcctttcctctctccctctatccctctctccctccctccttctctccctccctacactctccctccctccctctctccctccctctattctttccttcctttcttcctctcttctttctctctttccctccttcctttcctctctccttgcctcctttcttctttccttcttactcccttccttcttccctccattctttcctttctttcttccttccttccttcttctttccttcctccctccccacttctttgctttcttcctttcatttttccttccctccctctctccctttcttccttttgttctttctttcttctattctacctaccttcagaaaatgctagttgagctcccagtgtggctagcactttgtcagacacataaagacatgggcagagacatagaggagctctacccttgtggagcttgtggtctggctgatctaggcagatgttaagtacataaaagtatagaattacaaatggttatctggatgaagaaaaaataacaggtaacgtgaggtcacaaaacttggcctagtctgaaggtcagagtcaatttcctggaggaagagcagcttgagctaggaccttgaggaagcgcatgaattaagcacttgaaagggaggggaaggccttgaggaaagatgatcccagcacatttcttcaattcattcattcaatcatctgcacattcattccacacaaatcaatgttcaccatccttgagaaacactggagggcctgtgacaaggctgaggctgatggagagggaggcagatcctgcagggccttgcaggctgagtttaggattagcgaatagataggacgtgcagtagaaagacactgccagattttaagggggtcgtctcaacaccagaaatgtgttttgaaacaacgttatcttgggttgtgggttcctcagaagtaggctctgaaatggagaatgcacgtggaaagtttattaggatcctgagtcttaggatactggaatcttgggatcaacacctgtgaaagggaaggtatgggaagacagcagcattgggcagacagaggagctgagctgtagtgcagtctcaaggggaagccccagttgaccccatggtatgcgttggacctggaatgtccctttaaaagtgtcccgagttaggatgcaggggctgaaccccatgtccataagcccttggatggagctgagcctgcaaaacatctgaccctgagcacagctctttagcaggagcacaggggaggagggtgtctgcagcagcacttccagcagctgtgggaagaagcccttttcaagggagatctagacggtgcatccagcatcaccacagacactggtgttaaaaatccacccttgcttgtgtccttcctgaccatttgtttagttgtggtcaccagattctcatacaacatttagttattggctggccttccttcttttccttctatttaaacttatgtctcctcaagtggatgggccatatcttacattgaactgtggaatgcatcccatggaattcagcccaaggctactagataattacttggtgacaaatgcattcaagttctgacccagagccacagactaagaaagtaactgcttgcaattacttgttgaatgatggatgagcaacaaactttagcaattttccaacaagtgacagctttttataatatgtttttcctataagctgtagaggaaagagttgctgtatcctgggttgaacctaccaggtcccgtgtttccattttgtcctcatccattagctccaaaatattccagaaacacagaaaacttacattgactgtatacagtcatcagatacaaagacatatcaggatctaagaacacagaacattattctgttggtcaattaatttaaaatgaaaccttccagaaaatcaactctctttaaggaactggtagagaccactcctgtgtccctctacatttttttcagtctttattaaccggagtttcatagttcttcaaacatgctttgacaatagcacatttccttagtgtcatattctagttacctactcttgactttctgaggctgagagtgtttctttcccttggcccagttcagtgactcagcagattaccagcacataaggcctcaaaaaaacaaggtcaaaagaggctcctaggagagggcagtgctggctgcatgtgtctggtgtttactgtgctatttcaggccccttcagcctctgccacatgggtgggatggaggcatttaagacaggactgcagtagatgtagatagttctcacctacatgcccattgccttcattgtgtccacacctgcagatggcttcttgctacaagagccaccagaccttcaacctgctggctttcccgggctgcaagtcctctgaccggcctgtgtgatggactggctaaaaggaccagagttaatgcctgggaatagcctttgatcggttatggctgaaaataataattaaatattcaggtcccctgactgttgagtgggacaactctgcagagtgttatgaacatcataaccccaggtctccgtgggattaagctccaggtgtccacaatggcagcttgcttgaccccacgctctcctgacttctctctctcacttccccactctcctgctggtgcttcctggagctcccaaacaaaccaggatctgcctctggagagcccagcctaagacagaggctgtcttgatacctttacatggcctagagattataacctgaccctatctgtgcagaagcccttccatgtctcatccatagatgggagatgctttgtgaaattctgttctgtggctccaaatgagtactcacccttcctttgagaaaacagacaaaatgcaacccccattgtgacacctacctgtactctatgatgtcttgaggcatgcacttacagaaggtgcatgggcatcgttctacctcacctctctaaaaatgcacctgtgggctgctgactccatgttattattttctaaagcataacacaaagcaataagattacagtgttccatcaccaaaatccagcttactcatttcctgggcaccatggtcccgggcattatgatatgtctgactaagaaagtataaggagcaaacttggaagagccagaatattttgcaagggcacctctctaagcagcttacacttcggggctggatagggaaagctgtttacaaagcattcatgagaaacccagcactgtatttccaggttctgaaccccagaatgctccacacatatgtaggggctgcctgagtgacagcttcacctggggttgggctggagggacctggagccccatcaacatggccatttttgttggacattctgctgacccagctcacatgggcaggactgacagtggaaggttggcttcttctctcatcttctgccagaaatctgtcaggatttccttgctctgtaagttgaatctagatccttagaaaattcaacctagatggaaggataaaggtgctttatttctgaataaaaaaagttgaagggtgatccaatgacatttttcaacagggaatacttattgtacagatggtgaccagctcttcctttcactgagtcagggcagtcatggggactgggcttaaacacaggttgtccagataggaggctctgctggccctggaatgagagcctaagagatctatcagcattcttttttttttctcggagtcttgctctgtcgcccaggctggagtgcagtggtgcgatcttggctcactgcaacctccgcctcctgggttcaagcaattttctgcctcagcctcccaagtagcttggattacaggtatttgccaactcgcccagtgaatttttgtatttttagtaaagactaggtttcaccatcttggccaggctggtcttgaactccttacctcgtgatccacccgcctcagcctcccaaagtgctgggattacaggtgtgatccaccacgcccagccaagagatctatcatctttcctagagatgtgagttgatgaataagactggtacttgtctatcttttagactttggttaatagactgttctccgaggtggaccatagcattaaatggaagcttgttgcactatctggagaaatgtttgtcaaatagaatattttagggtgtatgtgtatgggttaaattcaggaaatatgcaccaccataaatatttatgaagctattaggttagtgcaaaagtaaaataatggcaaagaccgctattacttttgcacgaatccaatataactgaaacatcctgttgtttttcctcttctatctctgaaacacacctcctctccatccttagtgaccccttcatggtgatgtcggtgtgttttaatatcttcaggagtccctctcctctcctaatggctttttcaacagccagacagcaagacctaagcagggccaggccatccttgtaggcgcccctgtgtcctagggtgcctgataagtgctggctgctgtgagttactgagtaacaccttgtattttgtcaacaatctgggtaacaagctcacccaaattttaatgaaaacacatttacaatgtgtgaattgtgttcatttttaaagcttgaattgtatccattttaaaccttattctatagcacaagtaactgccactttgagttgtataactttagatgggccttgtgatttctgagcccaggaacaaaatgtgtgtaacaggagtgatcaggcttgcctaataactttatgagaattaaataagataaggaacatgaaaccactccatcgagtatacagtaggggtattttaattttactttaattaaaggaattaaaatgggatatgaaatgtatgaaatgaagtggattgctgcagaatagctctgacaacagggacaggcatgtttgggaacactgtctcagtcccctcttctaggtctgcctcctgcaagagcaacagctgggcttggccgaggccaggcaggtactatccattacactttactgttaaggcttttcaacagctattgaaggaactgacccactgtaatgtcaagttttcaacaacataggaagaaaataaagaaatgctaaggaaaaattgtttttgctgcttataaataaaagtacaaattgatattagaagaaaaatgctataatagataacgaaaagctttagtgagtattaaaaaggaaaaaaaaaacaaggtgtaaggaagaaagagctaggagaaagcaggctgagctcatcaggcctgctgtggtaaagatgtaaaagtttgccattttgaagaataaaaatatgactttatggtttatatcctgaaatcatatgctctattacaccatcagtttctttctcactgagatgagtgctctttttccttacaataagtacatttttctttttatttttactaggatccaagacttcaaagaaaacctataaatttaataaagtttctcctgaaacctacaacaaagaaaacaatgacaaaggaattgcccacaattctgtgactcccagtgaataccacagaagagatggccacactgggctctgctaccagtttttagaatcgtgagacaatgcagtagtagaaagaaaactaagaaaatcaagtttctgggctgctatctgcctgtttcaagcctcagattttgcaaatatctattttatagaatcagcagaagcaagccaataatgtctttatgcagtctacttgaaagcaaaaataacaaagacgccagtcaatactttgaaaatgatgtttatactagcctgggactcattgtttgctatgtttattaatacaactaaacaagaaatcctctccacttaaaggcagcacagagaggatttcatgttgaagaaatgcccacagtagtgacagtacaacttgcagaggactaagtcatcttttctcacatgctgagtcctaacacctaattatcagctaacaccatttctgatgttttagcatagaaacctttattatcttaacactggatgctaataagacattgttaatttctaaaacaaacaaacaaacatggacctaaaacctgacttccctaggaaataaaaaccctttccttgaacaccacagactctacagagtacaaagtgctagcaaatcataagcattcccttataaatatcaagatcaatattgaagtagctcaggattgtacttgacaggatttgagctttattggtggaatcttaaggtctcccacagtggtttttggtgttgataaagttggcatttatttatgacttgagtccttgcctgggggctgcagtcagaagcagcaggattttgtctaaagccaaagacttccttcatcctcagaaaggaagcaaggagctgtttttcctcttctcatttgtcctgcaactgtgaatttgtctctggggctccgctctgttgactttagagaagctatgcatacacttggtctcattctactctaagactaaactgcaaacacaaaccactctataaattgggagattaatttcttttgagaaggctcaactaaagtaccaagtctgcttgtaggaataacctttaaaaatcaaacaagcaatttataaaagtcagaaaccatacccggaagggtcagtgttctgttttgtctttaatagaaaatgccccggatctggcagaaaaaagccttcaaagggctcccattattccgaggatgtttttatggcaacatgatcagctacatttccaaaccttcatgaaatgatggcaggtggtctttctaagtaatcttcagcacattctctgtttgctgaattaccagtagacccatgcaagggattttggacaaagagccatttctcatcttgaattactcagaaatggaaaatagtaccttctgttccatttttttccatccgtgccatcattcacacgtgaagtcgagggaatgctcacctgcatgtttcatggtggagctaaggaccttggaggtttatttgcagctccttaaataacaaaaacactgaacctttgcaaataactctacaagcagctcactgccaaatagcagccactgcgcttctaagcagtgagatgcgtagatgatgagaaggggcttcccttgcccagaatacccaccccaactgctgtctcccatatgggggcccttctgcttctggctctcatcttactttcctcctatccctcctgccactcctctcctccttctctgttctccccactccacccctgatggctctggaaaggagaagtatcaacacaagagggcacagctgatgggcagggagaagggactcctcctgacacacagccatgggcctggaagattaagtcaggcccagaaataccacccaggagattggagtggattctacggggactcccaaatgggccctaactgagaatgtcagaaaacttgagtgatcatatcatttaaaaggagtgcccttaataagtcaactggggtaatggtttcataaacctgggcatccctcagcaaaacagcacagacaggggctcctgggtgggaagggtatgtggtattagaaagagcccagataggggagctagacagcctggctctgtctctaccttagactctgagactgttattgacaagaaagaaatgctgcatgagatcacaagagaaaattttagagaagtgaaacgtaatacaaacacaaggcacagctctagaattttgctacagccaaagtcctggatagtagggctgggagcaaggtggctggatggagttggttttacaagaatcacaaacatctgtcaaaatgtgactgaatatggggccctaaatatgtaaattaaacacgtaacaagccacagagcatgggtggcagcctgcctatgtgcactgtctacacaaataggcttactcaaatgggaaaagcatgagatggcagcgagctcattggcaaagtgacatcttgaaagtgattatgcaagaatacctggacatccggcctgtcacatcctcatcaccacagcaacaagagctgaactttctcaggcgcctaacatgtgcctcacacgtgccatctcatgtaatggggcaggatggagtcacagagccagggacatgattgattctaacaggcagtgtgatcaggttctaggcttgctcccccagtccaggtgggcagtggaatccacagtgggacattcacagggacatagcaagagcagctgctctggaggaagtgaagaggccagcgtccctggtccaaggcaagtcaggaatcaaggaaacagaaggaagagggtttctcaggtgtgcaggggaggagctgtccgtgcgtaggttcctgttcatgttcagcttctgcaattgcaaggcactcctgactttcctgggtggcacacagttttttgtgacctattagcaatgaagtggaggaaagcaaaattggaggtagaccctgggttactagcactggctatgcctcaagtttacttttgtgacctcaggcaaaagcttcgtggtgcatttggaatcaactactctttccctgaatttatagatagggaggctgtgtgtgagcagtcattggcttctcttctaatgtcttgtgaatcgtgtcatcacagattggtgtggatggagacctagcaatgagcacttgcaaagggtgtcatgaagaaccaagagctcagccttgctctgtgataactactaacttcactttttcactcttattttttatttcaatagagacaggttattgctatgttgcccagttggtcttaaactcctaggctcaagctatcctcctgcctcggttcattttgcacttcatgagtcaggaccttgactttaagttgtaacttcaggtgcacaataaagtgaagttgaaaagactgagcaaatgatgaatgagagaaaagatccactatgtggatcctggttttcattcttatcaaccacagttgctgaaaggaagcatcggtagagttctcgacagacagggatgttcttccagacgtgagttcagaaaggacagtgttgtgggttgaatgctatcctcctcaaaaaaggcgttgaatcttgaccctccagaacctcagaatttgatcttatttggaaatggggtctttacacaggtaattaaattaaaatgagatcattagggtgtgtcctaacccagtatgctgttgtccttttaaaaaggggaaatttgggtacagagacacacagggaagatgtcatgaagacacacagggagaaggtggccatgtgactagagtgatcggtttacaaaacaaagaatgccaatgtttgccagcaaacatcagaagttggaagaggaaaggaagagtcctaccctagagttgtcagagaaagtgtgaccctgccagcaccctatgggacttctggcctctggaactgtgagggactacatttccacagtgttaagcctcctggtttttgatacttagttaaagtggccctaggaaagtcatacagagggtctccccgggggccttcacccactcagagctctatgcctgtgaacttgggacagtggtgagcactgggagcagcctcatgggaacgaagatgctacagaaggcagcctcgggtgcatctttctgtggcaagcacagcctgagatggaactgcccgggtacagtgcagggcttggggacctcttgaggggacaggagcaccttgggcctctttggcaccagagggtgcacccatcctctccccagcaggctgcttgctgagtcaagcccacaacctgatatcatgtactcagggaatgagcattcccatgtttggttgatgccatttcatttattatactttagggaggcttcctaaaacactgcacaggactcatgtttacatatacgtacttacacacagaaagtattttggggtagaaatacctttgaatgagagccagcttctactccagtactggtcagtcccttacaagccgtgttaccacagggaaggaacttgaggtctttgggcagtttcctcactcgtaagtgggagaaataacctctcaagtttggtttgagatttaaaacaaattgtgcatataacaccagcattgcagtttttaaaggaagcagacctgtgtgatataattgtaagtaagatcttgagattcaagtggcaaaatatttgactgtcataaaattctattacctctctaagaaatgtaagccatagagttggaggattagtgagatttatgtgacagcacttggcaaaccatgatgtaaagaaacatgaatgtgtctctgtgtaaccactatactagcataacttgcaatattctcaatttcactaacacctatccactaaaaatttgatttcaaagcaaaaagacacactttgccagttggaagacagtctatgtgtggggatttgggggactacatagtatatattatgtgattcttgaagttgtgtggttatttatttatttatttttgcttaaccttgtgtaatcatgtgcaatttaagagatttcagataaatttggtttttcacattaaactctaattaggttaggattgataagcatttagcagtctcagctctttccaggattttaatttcctttagcatttatatggtgcctatcaaataaagtacacttgacatctaggcttgtaaaagagaagctcatttactggcattctgtgctttaaacacacacgcgcacattaataatggcagaatctcccaatcacctcttcttcccttcagtcatagggcgtggatactggaccagcagctgtaattgcatgagctctttgtagaccaataaagccatagccactgtgtgcatttatctagagaggtacaatgaacacggctgggccttagctggtgttgtgtaggatgtgttgattattccaaggacaatgtcctgattttgccctgggaacgtaggattgtagagccctgctacagaatgtaggggatttagatgcggttcacattcaaccattgcccagtttgtgcctcacttcttattagatgccttctggaatacccacctggggaatttctttgttcttcagattttctaacagggagggggccagtctgcttctctgtgccatgttcttacctcacactgtcccaaacacattccccaaaggacactttaacccccattaggtattgtcaccatagagttttaactgcctccctcttcctcacatgaatttcccattccactcacttttgacaggagtccacgcaactatgtgcaggcatttataattctggtaggaaaaggacaccaatgcaggacacaggggatataaacagaacagtatatgtaggagagaaaatattttctaagtaccacttgaatgtagaagcatgaatcaatcacacactaaggatgaaggatgcagagataccacatctctgcattttttctaaatcgaatgaaagctaattttactctaatatgttcattttgctctctgaggttgttcatgagcatcaggaattcagggccctataaggggcatgagttcatggttgtcatggtgacaattgctgacagcatctccttccctttagacataatcacggccttgaaagtgggtactgctgcacctactcctgccgaagtccagcaggagtggctcatgctctctgaccccatcctgaccacaaggaagtctggagtgttcccaagatagtggcttttcccagtcctcacctgcccgtgaagccatctccccttcaggccgtagtacattgaccttcttcaccttcaatagcacaaacattccatttctgcttgagccaacccagctttattctccaagggcccatgagcctgctgagatagctaaaagttgttaacctcttgttgcttgcagagactgagccttaggtatagactgtggtgggtgggaataattccattctaagtggtcttcaaggaacaaaacaaacccaagtgaaggacttctggattcagctgcaacatgcaaagagcttggaaatcaccactcccacccttataacaagagaaggctgaacacaccgaaaatcaacagtgcttctttgacccattaaagaattgaggtcacagggcaaaccctccaccctgaaatgtgaagagggaggcacacccaggaagtcacagccaagatatgcttacccgaagcagaagctgctggagtagtaagctaggaggacacttaagtggtcattttgattggttgctggaggctgagtgtgactagactagactagagtaagaagctcctgggggccacagacttaggggatccctatactttcacgggttttacctccaggggccccaccacttgagtgaaaagccaagaaaaacccacttgtttctgacaggaagtagggaaagtaagcattgaaaatacacctacagatagaggcttctccctaacaaagaccaacacagcagagggaaattctttaccagagcagcatataacctcagggggagggaagttttccagttccagcccccttcagcatgtctcatctaagtggggaagaggaaacactaagaagcccatatgaagtcacatccagggcataggcctaaaggactgagatttaatcataagattataaaacactcctcctccccaatactttatcaccacaccaaaagagctctattgcaataacagtggcttatagttgaaatgctgcaaagtataaactgtatttaaaaacaagttcttagggaagcccaaagataagagaaaaggtattgggtagtgatagtataaggatatccataataaataacagcaaccttataatggacaagaggaggacactggggttactctattatatggtgcactacatgtgaaatgatatggtgttatttgaaagtggatttagattgtggtaaatgcatattgcaaactctaaggaaactacttagaaaatcaaaaacaaagaaaaagtcttaaaaaaagccggaagaaaaaggataccttacatatagaaaaacaaggatcagaattacactggacttctctttagaaactgtgcaagcaagaagagagtacagtgaaatattcagagtgttgaaagaaaaaatatccaccaacctagaattctatatccaacaaaattatccttcagcacgaaggataaatactttctcagacaaataaaaaatcagagaatgtcactgatcattagagaaatgcaaatcaaaaacacgatgagataccatctcacatcagtcagaatggctattattaaaaagtaaaaaaataacagatgctggtgaggttgtggagcaaagggaatgcttatacaccattggtggaaggtaaattagttcagccactgtgaaaagcagtatgaagattcctcaaagagttaaaaacagaattaccattcgacccagcaatcccattactgggtatatacccagaggaatataaagaattcgaccataaagacatatgcacatgaatgttcatggtggcactgttcacaatagcaaagatgtggaattaacctaaatgcccatcaatgacagactggattaaaaaaatgtggtacatatataccatggtatactatgcagccatgaaaaagaatgaggtcatgtcttttgtgaaatgtggatggacctggagaccattacccttggcaaactaatgaaggaacagacaaccaaatactgcatgttcttacttataagtggaagctaaatgatgagaactcatgaacacagagaaggaaacaacaaacactgggatctacttgaagatggagggagggaggagggagaggaacagaaaaaataactgaaatgaaataatctgtacaacaaatccccaggacataagtttatctatataacaaaccttcacacatacccccaaacctgaaataaaagttaaaaaaaaaaattagaggttgtatcactagcagacttactctgcaagaaaagttaaaacaatttctttagaggaaaaaaatgacatagtcaaatactaagatctacgtaaaaaggagcatcagagaatgaataaatcaagataaaacaaaatcatttatttttcttattctgaatcttattcttatttgttcaaagtaatactagcaacaatgtgttgggtagttatataatatggataactgaaatgaataacagcaacattataatggaccagaggaggaaattaggattactctgttataaggtgcctgcactacctgtgaagtggtacaattttatttccaagtggatttagattgttgtaaatgtatattacaaactccaaacaaattacttataaaattttaagagaattataatttgtatgctaaaatagaattatttaaaatccttaatcaaaacaagagaaagaaaaatctgagggagaactttaaaaaggaaccaagagcaaatggaagaatagaaagtaatttttaattcagatatatcaataatcagtttacatatgagcattctacatacaccaatgaaaagacagagactcagaatgaactaaaaaccatgattcagataaatagtgtctacaggaaacctttaaatataaagtctcaggttttaagtgaagagacagagaaagatatgtcatgctacctataacatgttataaagatataacatgctaatccaaagaaagtgggagtagctatagtaatttcaggcaaaatagacataagagcaaggaagattatcatggactaaagagagtcattgcctaatgatagagggatcaattcttcacagatacataaaaatcctgctatgcatgcttccaacaggatactaagatattcaaggcaaaagctgatagaactacaaggagaaatagacaaatccagtattattagttggagacttcaataactctatcagcaatagacagactcagaaggcagaaaatcagtgagggcatagttgacctgaacagcaccatcagttatactctgtgaccttctttctgcacaggcagggtaaaggaagagaacagagactaggacagggtttcctcatggccttaactgactaattagtaatgtttacatttaaagaaggtgagaaggaatgtccctaaacacaataaagaccctatgtgacaggcccacagctaacatcatattcaatggcaaagagtttaagggttttcatttaaaatcaggaataagataaggatgctcactctcaccacctttattcaattgccctagacagagcaattggcaataataatagcaataataggcacccaaaccagaaagaaaaaagtaaaactgtgtcttctctgttggcaagtgacatgattctaaatacagaaaagactaaagatgccaccaaaaaaaaatcacattagaattaataaaagaattcagtaagttgcaagataggagacaacatacaaaactcagtagtgtttctatatactaacaatgaactctgaagaagaaatcaagaaaacaatcccatttacaatagcatttgaaaagccttaggaataaatttaaccaaggagggttacaccttgaaaacttaaaacattgataaaagaagttgaagaagatatacataaatggaaagatattcttgtttatggataggaaaaattaatattgttaaaatgtccatgttaccctaagcaatctacagattcaatgccatccctatcaaaaggccaatgacatttttcacagaaataggaaacaattataaaatgtgtataaaaccacaaaagaccccaaatagccaaagtaactatgagcaagaatgaagctgaaggtattacactttctaatttcaaattatataacaaagcaatagtaatcaaaaaggcatagtactggcataaaaacagacacatagactaacagaacagaatagagagctgagaaataaacccacacattcatggtcaactaatctttgacaagaatggcaagaatacacaatggggaatggctgatctcattaataaatgattttaggacaagaagatgtccacatgcagattaatgacattagacccttatctgacaccatgcacaaaaatcaactcaaaatgtattgaagaattaaacataaagcctaagattctaaaactcatagaagaaaacaaagggaaaagatcctcaacattggtttgagcaataattttttagatttgacacaaaaagcacagacagaataagcaaaaatagaccactgggaccacatcacactaaaaagcttctgcacagcagaggaaacaatcgacaaaacgaaaggacaacctatgtaatggcagaaaatatttgcaaaccagatatctgataagggattaatatccaaaatatataaggaattcatacaacttagtaacaaaaaagatttaaaagtgggcaaaggacctgaatagacatttttttcccaaagaagaatacaaatgttcaacatatatatgaaaagatgctctacatcactatcatcagggaaatgcaaattaaaaccacaatgagataccaccttatacttattaagacggtattatcaaactgtcaaaagataacaagtgttggtaaagatgcagagaaaagggaatccttgtgcactattggcagaaatgtaaattgctacaatcgctatggaaaacagtatgaaggtttctcaaaaagtgaaaaatagaactacaatgtaacccaaccatcctacatttgggtaaatatcttaaggaaataaatcacaatcttaaagagatattttacactcatgttcattgcagcattattcactgtagctaagcaggaaagaagtgtctgtcaacaaaggaatggataaagaaaatgtggtatacatatataaagaaatattactcagccttgggggagggacgtctgccatttctgagacttgagtaggtaaacaaagcagccagggaagctcgaactgggtggaacccaccacagctcaagtcctgcctgcctctgtagattccaccactaggggcagggcatagctgcagaaatctctgcagacttaaatgtccctgtctgacagctctgaagagagtggtggttctcccagcatggtgtttgagctctgaaaatggacagactgcctcctcaagtgggtccctgacccccctgtaacctaactgggagacacctcccagtatgggctgactgacacctcatacagccaggtgctcctctgggactaagcttccagaggaaggatcaggcagcaatatttgctgttctgcaatatttgctgttctgcagcctccactggtgatactcaggcaaatagggtctggagtagacttccagcaaactccaacggacctgcagctgagggacctgactgttagaaggaaaaccaacaaacagaaaggaatatcatcaacatcaacaaaaaggacatccacaccaaaaccccatctgtaggtcaccagcatcaaagaccaaaggtagataaaaccacaaagatgggtagaaaccagagcagaaaagctgaaaattctaaaaaccagagggtctcttctcctccaaaggttcacagctcctcaccagcaacggaacaaagctggacagagaataactttggcgagttgacagaagtaggcttcagaaggtcggtaataacaaacttctctgagttaaaggaggatgttcaaacccaccgcaaggaagctaaaaaccttgaaaaaagattagatgaacagctaactagaataaccagtgtagagaagaccttaaatgacctgatggagctgaaaaccatggcatgagaactatgtgatgcacgcacaaacttcaatagccaattcgatcaagtggaagaaagggtatcagtgattgaagatcaaattaatgaaataaagtgagaagagaagtttagggaaaaaagagtaaaaagaaatgaacaaaacctccaagaaatatgggactatgtgaaaagaccaagtctacatttgattggtgtacttgaaagtgatggggacaatggaatcaagttggaaaacatgcttcaggatattattcaggagagcttccctaatctagcaaggcaggccaacaatcaaattcaggaaatacatagaacaccacaaagatacttctcgagaagaacaacccaagacacataattgtcagattcaccaaggttgaaatgaaggaaaaaatgttaagggcagccagagagaaaggttgggttacccacaaagggaagcccatcagactaacagcagatctcttggcagaaactctaccagccagaagagagcggggaccaatattcaacattctcaaagaaaagaattttcaacccagaatttcatatccagccaaactaagcttcacgagtgaaggggaaataaaatcctttacagacaaacaaatgctaagagattttgtcaccaccaggcctgccttacaagagctcctgaaggaagcactaaacgtggaaaggaacaaccggtaccagacactgcaaaaacacgccaaattgtaaagaccatcaaggctaggaagaaaccgcatcaactaacgggcaaaataaccagctaacatcatgatgacaggatcaaattcacacataacaatattaacgttaaatgtaaatgggataaatgccccaattaaaagacacagactggcaaattggttaaagagccaagaccgctcagtgtgctgtattcaggagacccatctcatgtgcagagacacacttaagctcaaaataaagggatggaggaagatctaccaagcaaatggaaagcaaaaaaaagcaggggttgcaatcctagtctctgataaaacagactttaaaccaacaaagatcaaaagagacaaagaaggccattacataatggtaaagggatcaattcaacaagaagagctaactatcctaaatatatatgcacccaatacacaagcacccagattcataaagcaaatccttagagacctagaaagagacttagactcccatacaataataatgggagactttaacaccccactgtcaatattagagagatcaatgagacagaaggttaacaaggatatccaggacttgaactcagctctgcaccaagtggacctaatagacatctacagaattctccaccacaaaccaacagaatacacattcttatcagcaccacctcacacttattctaaaactgaccacatgattggaagtaaagcactcctcagcaaatgtaaaagaacagaaatcacaacaaattgtctttcagatcacagtgcaatcaaagtagaactgaggattaagaaactcactcaaaaccacacaactacatggaaaatgaataacctgctcctgaatgactactgggtacatacgaaatgaaggcagaaataaagatattctttgaaacaaataagaacaaatacacaacataccagaatctctgggacacatttaaagcagtgtgtagagggaaatttgtagcactaaatgcccacaagggaaagcaagaaagatctaaaatcaacaccctaacatcataattaaatgaactagagaagcaagagcaaacaaattcaaaagctagcagaaggcaagaaataactaagatcagagaagaactgaaggagatagagacacaaaaaaacccttcaaaaaatcaatgaatccaggacttacttttttgaaaagatcaacaaaattgatagactgctagcaagactaataaagaagagagaagaatcaaatagatgcaataaaaaatgataaagggatatcaccaccgatcccacagaaatacaaactaccatcagaaaatactgtaaacacccctacacaaataaactacaaaatctagaagaaatggataaattcccggacatatacactctcccaatactaaaccaggaagaagttgaatccctgaatagaccaataacaggctctgaaattgaggcaataattaatagcctactaaccaaaaaaactacaggaccagatggattcacagcagaattctaccagaggtaaaaagaggagctgttaccattcctcctgaaaatattccatcaatagaaaaagagggaatcctccctaactcattttatgaggccagcattgtcctgatacgaaagcctggcagagacacaacagaaaaagggaattttagacccatatccctgtgaacatcgatgtggaaatcctcaataaaatactggcaaaccaaatccagcagcacatcaaaaagcttatccaccacaatcaagtttgtttcatccctgggatgcaaggctggttcgacatatgcaaattaataaacgtaatccatcacataaacagaaccaaagacaaaaaccacatgattatctcaatagatgcagaaaaagccttcaacaaaattcaacagccttcatgctaaaaactctcaataaactagatattgatggaacgtatctcaaaataataagagctatttatgataaacccacagccaatatcatactgaatgggcaaaaactgcaagcattccctttgaaacttggcacaagacagggatgccctctctcaccactcctattcaacatagtgttggaagttctggtcagggcaatcaggcaagagaaagaaataaagcgtattcaattaggaaaagagaaagtcaaattgtctctatttgcagatgacatgattgtatatttagaaaaccccatcatctcagccaaaagtctccttatgctgataaagcaacttcagcaaagtttcaggatacaaaatcaatgtgcaaaaatcacaagcattcttatacaccaataacagaccaacagagaaccaaatgatgagtgacctcccattcacgattgcgacaaagtgaataaaatatctaggaatccaacttacaagggatgtgaaggacctcttcaaggagaactacaaaccactgctgaacaaaataaaagaggacacaaacaaatgaaagaacattccatgctcatggataaaaggaatcattatcgtgaaaatggccatactgcccaaggtaatttatagatgcaatgccatccccatcaagctaccaatgactttcttcataaaactggaaaaaactactttaaagttcatatggaaccaaaaaacagcccacgttgccaagacaatcctaagcaaaaaaagaaaaaaaaaagctggaggcattgtgctacctgacttcaaactatactaaaaggctacagtaaccaaaacagcatggtactggtaccaaaacagagatatagatcaatggaacagaacagaggcctcagaaataataccacacatctacagccatctgatctttgacaaacctgacaaaaacaagaaatggggaaaggatgccctatttaataaattgtgctgggaaaactggctagctatatgtagaaagctgaaactggatcccttccttacaccttatacaaaaattaattcaagatggattaaagacttaaatgttagacctaaaatcataaaaaccctagaagaaaacctaggcaataccattcagcacacaggcatgggcaaggacttcatgactaaaacaccaaaagcaacggcaacaaaagccaaaattgacaagtgggatctaattaaactaaagagcttctgcatggcaaaagaaactaccatcagaatgaacaggcaacctacagaatgggagagcatttttgcaatctacccatctgacaaacggctaatatcaataatctacaaagaacttaaacaaatttacaagaaaaaacaaacgaccccatcaaaaagtgggcaaaggatatgaacagacacttcccaaaagaagacattatgcagtgaacagacacatgaaaaaatgcttatcatcactggtcatcagagaaatgcaaatcaaaaccacagtgagttaccatctcacaccagttagaatggtgatcattaaaaagtcaggaaacaacagatgttggagacgatgtggagaaatgtgaacccttttacactgttggatgaagctggagaatattatgctaagtgaaataggcaagacacagaaagacaaatactgcatgatttcacttgtattaatatatggaatcttttttttataaagtcaaattcatattaacagagtaaaatggaggctatcaggggcagtgggtggggaaaaaggggagataattggtcaaaagataacaaattttcagtaacaagatgaacatgttctggagccctaatgtacagcattcgtgactacagttaataggactggattgtataattgaaattgctaagagagtagatcttaaatgttcacagtacatagacacacacacacatgtaagtatgtgaggctatggatacattaattagcttgtgtggtaatcatttcatactccatgcgacatactccatgattccatttatacgacattcatgaagtaaaacgataaaaatggagaatgggttggttgttgtctggggttggggtgggagggagagtgtaggaacacctataagggggtggcacaaggagggagcctggtgtaggggtttcttgattgtgttggtggttacattcagctgcacatgtgatgaaactgcaaattgctacacacagtcacaatacatacacacacaacacatacacatacacaaaaataagtgcatataaaaccagtaaaatctgaacaagctctatagactgtacaaatgtcgattcctgcagttaattttgcactatggatgcttaagttgttactactagagggctggggaagaatgtgtgggactaccctagtacatttccttgcaccttcctatgtatctatatttgtttcaaaataagacttaaaaaataattttataaaatataagtgtgaaagaagagcagtaaccggacattaatattttagataatatgtgactttaaacatgtatctgtaatgcaattaatgaacaaaatattacaagtgtacctttgactattttattcacatataccaaattagtgtggttttcaaaacatcttttaaaaatatcttctcactaggaaaatggggattgcctgacatttgggattgcattacatctgtacctaaataattaggttcctccttggtgcccatagcaccctgggcataatcctatcaacacactcacaaatacctgtttgtgggcttctcttttcaccagttgctaagtttcttggtgtcagaataatagcatgggtgagggtagagctgggtttgttcatttcttcctttgttctttctcttgttcatccttttgcccacccattcatcagtgtgttaattcactcattctttcaacaaacactgagacctaggactaggcactaggcattgagtgctgggtgctgagtgcacactcagtaatccagggagacaagatgcatgccctttggagtttacatccctgtgaaagagctaaaaaaataaaataaaaacaccaatcacaaaagtagataagctaatgaagaaaataattgaaaattgtgattatcattcggcaagtagaaataagaactaagataagggagagcgacagagttgggggcagagactcctttcggtcagatggtccaggaaaacctctctgtgtttggcatgtttaggctgagtccaggagattgagaagggttagcagtacgaagagcagaatgacattccaggcagagggagcagtgcgtacaaaggccctggggtagggaacggtcgagtatgctcagggagtcagtgaaggccaatgtgcaggggactggtggccagggtttaagtcccaggggcagaggtggagaagtctgaactcacaccttcagctctagatgctattgcagggtgaagcatctctgaggctcttgctgtgttaattcttataggatacctatctgtttattttcaaagccacatcctgaattttgagaaaaataaaagaacattttaaggctcagaatccaacctgctgagagtatgtgttcaactctggactttctcagagcctgtggttctctttggcctaggtcaggattgaaacacggagaatcatgttaacaatggttcctaagttgccatatccactctcagtggctatgggagctaggggtactctcctcctgcatgacagctcaaacccccttacaactgctgccctcacttttcaactccttggccaaagagggtcacaaggcaaagacagtggtggacatggggttggtggggagagcctttccatgccctgcacccatgctggggctccctgggggctgctgggtatttggtgcactggctggtgtcctctgtgtactaatccactttcagacagtctttcttattttgcatgtcattgttgtgcctgtggagggagtggtggggagaagcatgtggcctcaggaggggcttgcatcagtcctgcaagtctgaacctgagaaccatccttgacacttctctctctttcatcccccatataccatccatttctaaatccaatcacttttgcccccaaataactctgaattctctccccttcccattacatccacagttatttcctagtcaaagctgcaattatttcttacttggaccttggcacatttcaggcacacacattttctcttcatcccccagcttaaaccagttcagtgactttccattttcccactgttagaccaaaagccagaatccttggcatggacaatggcctgggtacagccaggatttgttgccagcctggcctccctcgttctgctccctacatctctgtgttagccacactggccttctcacagactctggagcataccgtgccatctcccaccacagggcccttgcacatgctgtttcttctgcctggaatgcccactccatcacatcctgcacaaatatattggccccacttaattctgtacatgtttaagagctcaggcctaagcttcacttccttagggagttctctatccaatggattctactccagtttagaccaattgccttctccctctgtgtagtaatgattggcttaatatttgtctccactagagtagaagctccatggaaacaagaccctcaccaatgttgttctccactatgtccaagaggcccagtacagtggcaaactcatagcagaaacacaataaaataggtgttgaatgagcaaataatgaattaattgggaagtgggagtaggggatcttgggttctagtctttctttcccttcctccctatctctctctctctctaactcaatgagcagtataatcaaactaggtaacaagtagaaggggtaaaaatacagggcttgggtagtaagagctgcaagacatgggacagagaaatccataaatgtccaatgtatgcaggcaaccgaaaagccctcagcatctgacatttctctgagtatggcagaaatctaaaatgtgtcagtggcttggcccctgagcatttagatttttgtaggctaccacacatttgggcaaaactacttccaaactgctgggccatgtatagattactactttcctggcctgcttttaacatttatttgtaggaggcaagactgagccaatggtcctgagggccccacggtaggccaccgagggctcaaagagtctggcggcaccattggctcatgtgcatacccagcaaactcatgttcttgcatccagctttggagctggtgggagacactggataaggactctgttttcaaggaacaaccactgtgagctagcttaagtcgaaaggggaaatttgtatctccagacttgagaccatgtcttataaaggatcaaaaccaagcacacagccagggctgcctccctctggacatcttatttattctctctgattttagagagctttggtgggtgtaagatgtgaccctgctccttccatttaagagacttgcccagattgggcatctgagtcccgtcctgaactctcagaacaggaccccgacaggcgcagctgcatgagggtccacatacagcccaatgaaccatggccagggtggagaggtaaccatgagcaaaccacagagctcctcagatccactcctggaagttaagggggctgatgagctggtggcaagcttggtaaacacgctaagaggctctgacagtatgatgcctatctttggaatgaagggtctgtactgaatgttaatagaatcagcagtgggaaactccaagtaaggatgaccgcctttttacgacatatcatctggtttattgtactgtacacggtgagtgcattatacacggtatgagactggaagtccctgtggtaagaaactacgtggtctggtgttctaacaaataacaaatattctactggggctcaaaaataagtaataatgacatcatctccacggctttttcattactgacactagcatggaagctattcttcatggcttaagtaatccccagtaatcaaaacaaggcaccatcttgctgaagaacccatttgctttgctgctggggaatgttgtcatgtgaggaactgaagcgtaatgagagtgactcacaaaagggtttccacacggagagaacaggccaccatctccagccttccttttgttttctatgcccataaatttgattttatgcaccttgcagggttcatagccacctgcattctctttccattgaggatgccctctgcaatcctggtccttaacccagagaaagagcgcaggagtatcaggagtccggatgaagtctgaattatcagcaactgaaagttgtggtgtcagaacacagcaaggccggtcatgaagctggagcaaagagggtgatgtcacactagtgcgtgccgactatgagctacaccgactcacacaggcctcttttattccaacaacaacccctcgaggtcagtattaagttatatagcagcaatgggtaaccactgagtcatttaatgcacagatgtaaatttggggacaatttttcttacagtaatgtggggagcagattcagcagcacacacactggaggcagaatgtttatgttctgcagagcaaaaaataaaaaaaaaaaccctttcaaccatcaaaagaccaggcaagtcttgctgatttgcaggacagaggggcttctggcaagatgtgcctggagccaggggagcggcgctgaagcctcagggatgcgcagggaggggcaggatgtggtgtgcattgccctggaatcatgttcctgagcctcatcaaggaggagccgggtttcctggagcagccgcccctgtgatgacacgaaggaaaaggatatgatcaatatcctttctgaaaaggatggaaaaacggcaccctcccctggactcgcacacatttttttctagctcagcaagaaagagtgaggtcccctcagcctctgcgcacatcagggtgacaaaggtggacaatgtctggttcgcctttcaccttcaaggccaattctgggacttacagagtaggtgtcaaaattgtattttaagacaaatgcacttggtactgatgtgcttaatggctccattttagacattttccacaattcacactcacacctgaggcaatcagtatagaaaaatcttggcagaaaagtgaacaggtgacaggtttgggttacctgtgagtgtttaattgaaggactgtggtttccttactcctttggcttcacacagataattaaaacttgaaagtgctttgaatatttattcatttttttcaccaacagctgatgatcattaaacacacagaaaattcacaataagtatttggtcaagccctttgttcttcctgttcgtacaaacctgcagggtggttatgaagatggatgcgctctgggtatacattggttttcaactctgctgaaggatcagacaccctcccagatggaacagccccacctctggctataaatattataaccccagggatttctaaggaaatacatattcactgctgaaggtcccaagtgtgaatttagcttaaggaatgtggaacggcagcccctgcctttaaactttataataagggtccttcctggaagcgcagcctcccgggcccacgcgacgtcttttcctggaaaaccaaagacctcaagagctgccgtggccagggcaggctctcaggtctctttggctctgagctcctttttgtaattcagcttcctgacgcctgcatgaagatgccaaacacgaaaatggctattgtcccattctaatggacaaaagtccagacaggaataggccttgaaaaaaatgagactctgccctgtttttggccagtcctgacactaggatccttcctataatactcaggtgaggaaaaaacaagttacatattttctttacctgcaaatactgtgaaataataaaactttagagcattattaaacttgcacttcagaaagaaaactattgtattcccacattttgattccaacacacacccttcccttccaccctcacattcttcatattcctgaaattgagatgcatcttaccctcagagtttacattttatgtcatgctcctctcttgaaaaaaaaatctgttattgagttggttctttgtctttcatcttatgctatctgaattagggaaatgtgccatgtgtttttcaccatccaattaatttaaacacaaatatgctcaataactgcaaaaggtgactctaatgagctctgtggaaagcatttatttcttcctagacacagaaatttccatccttattcagttggtctttcacttatttttgttctgttcttgtaggaaccccatgtatttcttagcccaccttgatctttattgggctgttatattgctttttcaaggacattattattgtatgcaaaaagtccttattctctgactatgactatgctctgcattcactttgaaaaaaaaagtttgtaaactaatttctccagtgatttgctccccctaatgctctgcaaaatgccagctgcctgtggatattcctggaattggctgcttgaaactaaaggctctcaagttttgcaatgatttttccatgatcctggctgtgtctgaaacgttttgatgtgaagaagcataaactggctggaccctgagctgcaaatgaatttcgtggtcggcaggactgagagtttcatgttactttctgtgcaagaccacccactgtctccccatgacctctccactgccccccacccactgggatgtacagctgctctggagatgttattgagccattctccttcaagtgcactagccactcaacaacacacactttaaggttaccgccttgcgtccaccactatcttgggcatgatggggacaagcagggcaacccttgacataaaaagattttgttttgattttcagatgtaaagtctctgagctcatgaacctttattccacaaggacacgttacatgcacagaagttctcagggcataacagaaaaaaaaaagcaagaaagcagggttctcctaacagtaatttgtgccctgtcctgtgttaacccagattcctttatcaggaccctgcactcatccccaattgctgggcatgtgggctgctaacatttcacagctgcatacttttctgaagaactgcctttggccaatggtttccacttgtcctgaaatatcaggcagcatacacatccattggtatctgacacaggaatacaaaagactggtccccttgctttgaagtgggataaacctatagtgctgtcatgctacatgtagggtcacgctgagattagaccccagcaacaccacattttcacctggccctttcctctgccccacctcatttctttcctatctcttctcctaaaatgctcatttagtaaataattcaaaataattcttaccttgggctttgcttctaggaaaattgacctgtgaaaaatgttttatctctttaagaaattttaaaataaaaacaaagaagggagggaagacatgtaagattacccttcatgcaggcctttattcaggccttgctatggaaaagaaactaaaataccacccctaagagagtttcctggcttcagcaatgccacccctagtctctttagaagaacctttcagtggcatccttctatagcaaacaccacacaccatgcaccccaaatagctgccaagaaatggaacaggggcagcaggggctgcccttcctctggagggtagaatcagagccctgacccatgtccagagtggaaggtaaactcaggttgagttcaatagaaggagcatctaaggggctcatgcagacagaaaaggtcttcatgagtcaggtatgcagtgactctggagttagatgagaatcttacagttctatgagggaagtcactgcaaaatgactttcatggaattccagaaaaccatgtccaaaaatagcaaaataagatcctttcttgcactgtagtttatgtagggataaaatatacattttgaaatgagacagagtgaccacaggtagagtgaatatggcagctacagagggctaaatgcatcctcaaggtacaccaggcttaaagcatgaaagcaggaggtaatatcccgactctggtgacccaagaggctgttaggcaggtgttggacaccatggcagacagttaagcagtaaggaaaataatcctgtagtgtatgaacctgagctgacttggtgcccacggctgggctgggctacatcaggctcctctggtgtgagtttacatttcaaggtatgacacttgatctcaaaatagtacaaaacacatgagagcaagctgtgtgcataaattggttccagtgcacacaataaattaaatacagataaaaacatatttattgtaaatagaactggcatcccaagttataaaaatgtagtaatttgattcctgacatgatgttttagcactcttcaccataagacccaccagacccatctttgtcagtctttgtcactccatcaattcctttctcaacagaggatgaacagggaaagataagaaaaaagagagaaagactgagtgaccatgggactgagaggcagtcaaacatgtggatgatgggtggatggatggatgagtgcataaatagggagagagagaaaaaggggcactgggagacagggaggcatacatttatttatatagacagagaatgaaaatagcagttttgcctccatagaaaaagcattcctgagaatgaagtcaacacaggaaaacaacacaaaggtgagagagggacagatacataaagacattacatgaactactggatccactataatatagtagaaacaagagtaagctcaagatcagtttcagagtttgcttggggagcaggagagtccatgagtggccaatgttcctacctgggtatatgttcctaaaaacttttctgtccaggccaatacatttcatttcccattgtcttagttcctcatgtgtcaagtgtgtggggagatgaatgtaatatttgaaatgtcatatgattcttttgaatcaagttttgctcactattctttcattactctttcaaaatttaggtttcagatcctatttaattttattctatattggcacaatccataataaattttcttatattctcacctctcactgctcagtagtttacttgtatttagttaagattttcatatacaaaaaagtaatgattttgtgatgatgaatactgttgaggttttcttcattttatttcttatcttaaaaaaataatccttctaatctgatggcatataagaagtttggtagtcatcatttctgtccttacaaaaggaaaaagctgaataaactgaaaatcaactctcttctaagattcaacagaatattaatgtcacagggcgaatgctgtccccaaaactgtagaggcaagcaaataaagagaatcatagcttactgggagaagagagtgctgctgcagccagtgactcacaggaaaacttaaagggtaatagactaattgctgacgtctgagagttttctcctggagacccagccttatggggacccacactttcatgaatctgatccccaggaatttcaccatgttctcagagtgaagatcagagaatattttcttcctaattccattgggagaagggaaaagtaaccatttggaaatatgcccggagtattctgttctccataacaaagacctgccctcaaaacaacacaaaacaaaacaaaaactgttttatcagagccttactcaacatggattaagggcaatatccaactctagccccttctaacctcactgttctatctaagggggtgaggggagctgagaagcatttgtgcacataacaactcagaggcacagatccactaaaagactgagatctaatcataggattacagaaagcttcctctctccacacaatttaccaccacttcaatagggctccagtgaataacagaagataacagctgaaaaaactgttaatgtcggaccatattttttaaaaaaagaagtctctggggaaacagaaagacaacaagggatacccaaaaagtgacatcagggaatatttagcctctgacacctacaactgaagcaaataaaagacatcctaacttctagtcagatgaattttaaaaccccacactcaaagcctatttatttgtttcttttagttaatatgtcatctttgctttcaacacaaaaatttacaaagcatactaaaagacaaaactcaaaacaaaattaaaaagcccagtccaaagagaaagaacaagcatcagaaccagacccagatacagcagagattttggaattattagaccaggaatttaaaataactatgataatatgctaagggctcttgtaaaaaaaattaggcaatgtacaagaacaaatagataatgtaggcagagagatggaaacgctaaaaaaaattaaagttaaatgcaatgaataaaaaacactgtaacacaaatgaagaatgcctttgatgaacccatcagtagactgggtgtggctgacaaaagaatctgtaagcctgaacacatggtactagaaagcttcccaaactaaaaaggaagggaaaaaagaatgaaaggaaaacgaataaaacattcaagaaccgtggaacaatttcaaaagatgtaacatgcatgtaatgggaatatcagaggaaggaaaaagaaagaaataatgaagagaagaaatatttgaagtaataatggctgataattttccaaaactaattacagacactgaccactgacccaggaagctcagagaatatcaagcagggcaaataccaataaaatctatacttaggcatatcatattcaaactgcataaaatcagaaacaaaaagaaaaccttcaaagaagccaggtgggaggtgggacagcattacctacaaagaaacaagaaaaataattatatcagatttattttaagaaacatttcaaaccaaaagagagtggactaaatactgaaactcttggggggaataaaaaacacacaccaacctagaattctgcatccagtaaaattatccttcagaagtgaaggagaactagattttgtcagacaagcaaacactaagaggatttatcatgtgatgttgaccttgtatcttgggaccttgttacacagttcactgagtaatattttattgtatgaaatgaatgtatcacacattataaaccacaatttgtttatctgttcaactattgaagaatatcttacttgcttccaagttttaacaaataagaataaagatgttatagatattcatgtgcagatttgtgtgtggatataaatttgatttctttcaacagtactttgttttttaacatatagatcttgtacatattttgtagtatgtatgcatactgctttattgttgaaataatactttatttctaaaaaaattaaaattatagggttttaaaaatttttataaaacttattacacaggcccattatctataataaaagtgatttccctgaaaagttaattttccaggcatttggggagagagttggagaggtaagtagatggaacacaggggatttttaatgcagggaaatgattatggtattgttagatacatgacattatgcattttctaaagcctatagaactatacaaaacaaagaacaaaccctaatgtaaaccatggacttttaaaaataataatgtatccgccaggcatggtggctcatgcctatagtgccagcactttgggaggccaaggtgggtggatcacgaggtcaggagatagagacgaacctggctaacatggtgaaaccccgtttctactaaaaggacaaaaaaaaaaaattagctgggcgtggtggtgggcacctgtagtcccagctacttgggaggctgaggcaggagaatggcgtgaacctgggaggcagagcttgcagtgagccaagatcgtgccactgcactccagcctgggtgacaaagccagactccgtctcaaaaaaaaaaaaaaaaagtatcaacattgactcatcatttgtaatacgtatgccacactaatgcaagatattaataaagaagactccggggtggggagagggtatgtggaaactctccctactttctgtgcaatttttttataaacctaaaacgagtttttgaatgagtgtttaaattttttcaagtaacccaatatttttatttatttttttttattatactttaagctttaggtacatgtgcacaacgtgcaggttagttacatatgtatacatgtgccatgttggtgtgctgcacccagtaactcatcatttaacattaggtatatctccaaatgctatccctcccccctccccccaccccacaacaggccccagtgtgtgatgttccccttcctgtgtccatgtgttctcattgttcaattcccacctatgaatgagaacatgcagtgtttggttttttgtccttgcgatagtttgctgagaatgatggtttccagcttcatccatgtctttacaaaggacatgaactcatcattttttatggctggttggattccatggtgtatatgtgccacattttcttagtccagtttatcattgttggacattcggcttggttccaagtctgctattgcaaatagtgctgcaataaacatacgtgtgcatgtgtctttataacagcatgatttataatcctttgggtatatacacagtaatgggattgctgggtcaaatggtatttctagttctagatccctgaggaatcaccacactgacttccacaatggttgaactagtttacagtcccaccaacagtgtaaaagtgttcctatttctccacatcctctccagcacctgttgtttcctgactttttaatgatcgccattctaactggtgtgagatggtatctcattgctgttttgatttgcatttctctgatggccagtgatgatgagcattttttcatgtgtcttttggttgcataaatgtcttcttttgagaagtgtctgttcatatcctttgcccactttttgatggggttgtttgtttttttcttgtaaatttgttggagttcattgtagattctggatatttagacctttgtcagatgagtagattgaaaaaattttctcccattctgtaggttgtctgttcactctgatggtagtttcttttgctgtgcagaagctctttagtttaattagatcccatatgtcaattttggcttttgttgccatttctgtttgtgttttagacatgaagtccttgcccatgcgtatgtcctgaatggtaatgcctaggttttcttctagagtttttatggtttttggtctaacatttaagtctttaatccatcttgaattaatttgtgtataaggtgtaaggaagggatccagtttcagctttctacatatagctagccagttttcccagcaccatttattaaataggaaatcctttccccatttcttgtttttgtcagatttgtcaaagatcagatgtttgtagatatgtggcattatttctgagggctctgttcttttcctttgatctatatctctattctggtaccagtaccatgctgtttcggttactgtagccttgtagtatagtttgaagtcaggtagcatgatgcctccagctttgttcttttggcttaggattgacttgtcaatgcaggctcttttttggttccatatgaactttaaagtagtgttttccaattctgtgaagaaagtcattggtagcttgatggggatggcattgaatctgtaaattaccttgggcagtatggccattttcacgatattgattcttcctacccatgagcatgggatgttctttcatttgtttgtgtcctcttttattttgttcagcagtggtttgtagttctccttgaagaggtccttcacatcccttgtaagttggattcctatgtattttattctctttgaagcaattgtgaatgggagttcactcatgatttggctctctgtttgtctgttactggtgtataagaatgcttgtgatttttgcacattgattttgtatcctgagactttgctgaagttgcctatcagcttaaggagatttggggctgagacgatggggttttctaggtatacaatcatgtcgtctgcaaacagggacaatttgacttcctcttttcctaatggaataccctttatttccttctcctgcctgattgccctggccagaacttccaacactatgttgaataggagtcgtgagagagggcatccctgtcttttgccagttttcaaagggaatgcttccagtttttgcccattcagtatgatattgtctgtgggtttgtcatagatagctgctattattttgagatatgtcccatcaatacctaatttattgagagtttttagcatgaagtgttgttgaattttgtcaaaggccttttctgcatctgttgagataatcgtatggtttttgtcgttggttctgtttatatgctggattatgttttttgattttcatatgttgaaccagccttgcatcccagggatgaagcccacttgatcatggtggataagctttttgatgtgctgctggattcggtttgccagtattttattgaggattttcgcatcgatgttcatcagggatattggtctaaaattctctttttttgttgtgtctcggccaggctttcatatcaggatgatgctggcctcataaaatgagttagagaggattccctctttttctattgattgaaatattttcagaaggaatgtaccagctcctccttgtacctctggtagaattcggctgtgaatccatctggtcctggactttttttggttggtaagctattaattattgcctcaatttcagagcctgctattggtctattcagattcaacttcttcctggtttagtcttgggagggtgtgtgtgtcgaggaatttatccatttcttctagattttctagtttatttgcatagaggtgtttatagtaatctctgatggtagtttgtatttctgtgggattggtggtgatatcccctttatcattttttattgcgtctatttgattcttctctcttttcttctttattagtcttgctagcggcctatcaattttattgatcctttcaaaaaaccagctcctggattcattgatttttttgaagggtttttttgtgtctctatttccttcagttctgctctgatcttagttatttgttgccttctgctagcttttaaatgtgtttgctcttgcttctgtagttgttttaattgtgatgttaggttgtcaattttagatctttcctgctttctcttgtgggcatttagtgctataaatttccttctacacactgctttgaatgtgtcccagagattctggtatgttgtgtctttgttctcattggtttcaaagaacatctttatttctgacttcgttttgttatgtacccagtagtcattcaggagcaggtttttcagtttccatgtagttgagcggttttgagtgagtttctgaatcctgagttctagtttgattgcactgtggtctgagagacagtttgttataatttctgttcttctacatttgctgaggtgtgttttacttccaactatgtggtcagttttggaatacgtgcagtgtggtgctgagaagaatgtatattctgttgatttggggtgcagtgttctttagatgtctattaggtcagcttggtgcaagtcctggatatccttgttaactttctgtctcgttgatctgtctaatgttgacggtggggtgttaaagtctcccattattattgtgtgggagtctaagtctctttctaggtctctaaggacttgctttatgaatctgggtgctcctgtattgggtgcatatgtatatataggatagttagctcttcttgttgaattgatccctttaccattatgtaatggccttctttgtctcttttgatctttgttggtttaaagtctgttttatcagagactaggattgcaacccctgcctttttttgttttccatttgcttggtagatcttcctccatccctttattttgagcctatgtgtgtctctgcctgtgagatgggttttctgaatacagcacactgatgggtcttggctctttatccaatttgccagtctgtgtcttttcactggagcatttatcccatttacatttaaggttaatattgttatgtgtgaatttgatcctgtcattatgatgttagctggttattttgctcattagttgatgcagtttcttcctagccttgacggtctttacaatttggcatgtttttgcagtggctggtaccagttgttcctttccatgtttaatgctttcttcaggagctcttttagggcaggcctggtggtgacaaaagaatatttttcaaaagcttcatttgagaatggagttttagcctaaagctattaattttcttaattttgaaatagacccaattattacacatctttttttgttaagatcaccttttttcttaatatttaataaccatacaactacaaaacatgagagtcaaattgaggtagaataagtaaagagagacaaactcttatttatctggcaaattcccatcaaacaaatgaaacagaaaataaatgagcatcatttatgaaaaggcttatgtgttttatagctctatgcccacagaaaatgtaacttattgtatcagtcaaagtgtccctcagaatctgagcactgaattttatttatttatttttatttatttatttattttttactttaagttctgggatacatgtgcagaatgtgcaggtttgttacataggtatacacgtgccatggtggtttgctgcacctatgaacctgtcatctagattttaagtcctgcacacattaggtatttgtcctaatgctctccctccccttgaccccaccccacaacaggcccgagtgtgtgctgttcccctccctgtgtccacatgttctcactgttcaactctcatttatgagtgagaacatgcagtgtttggttctctgttcctgcattagtttgctgaggatgatggcttccagcttcaaccatgtgcctgcaaaggacatgatctcattcttttttatggctgtatagtatttcatggtgtatatgtgccacattttctttattcagtccatcattgatgggcatttaggttggctctaagtctttgctattgggaacagtgctgcaataaacatacgtgtgcatgtgtctttacagtagaatgatttataatcctttgggtatatacccagtaaagggattgctggatccttgaggaatccctgaggaatccttctagatccttgaggaattgacacactgtcttccacaatagttgagctaatttacattcccaccaagagtgtaaaagcattcctatttctccacagcctcgccaggatctattgtttcttgactttttaataatcaccattttgactggtgtgagatgatatctcattgtggttttgatttgcatttctctaatgatcagtgatgatgagctttttttcatatgttgttggctgcataaatgtcttcttttgagaagtgtctgttcatatcctttgctcactttttgatggggttgtttttttcttgtaaatttatttaagttccttgaagattcgggatatttgacctatgtcagatgggtatagtgaaaaaattttctctcattctgtaggttgtctgttcactctgatgctagtttcttttgctagcactgaattttaaatgctgacctacttattattgctttatactgggttcaatgtggacagtatcttacacaaatacctttcaggaatcaccacacttctcccatcactctatccacatctacacccgccctgagtggctgcaattatcagtagtgtgagaagtagggaatctaattatagccatcaaaaaaagtgaagtgaagtgcagtgaagctaaagcagcaacgttacagtccaccctgcactgtgcaccctgcactttggctctggtggtacaagagaactcaaagctgacactaactttatttatttgtatctcaaggtttaaaacagcagaaattatcactactgaagtgttgaaggggcagtgtgaaaatctctaagcttacccctagccccccaaaggttccattttttaatacaaaacttgacttgatgagcattcagttcaatcatgcacattgtcattgctggtctgtgcaatgccctcctcttatttctattgatggttgattgattcattcattgttttgcactgtattcttataatcactattattccccttccccaaagggaatacatgctaatgtttttaataaatgtccttgtatatggacatattgtgaacaagaagggctttttttcttttaaagtaatttttgacttatagaaaagttgtgaagatagtacagagagttcccatataccctaaaccctgtttcctctattattcacatattaccttaatagggtatatgtgtcacactaatcaatcaatattagtatatatttatgcattaagctccacactttattcaaatttctttagtttttccttaatgttcattttctgtcccaggatcccacccaggacaccatgttacatttaaccatcatctctcctttgccttctctgttctgcaacagtttctcagactttccttgtttttgttgaccttgacattgaggagtactggtcatgcactttgtagaatgcccctcaatctaggtttgtctgctgtttttctcatggttagatggaggttgtgagtttgtggggagacaacagagctgaagtgctattctcaacacatcaaacaagggtgcaagtcatacatatgacttatcactgatgatgttataaatacaatcacaagaatacaaagaagaaaattagcatttctactataatgcttatttcttttttggcaataagactagggttgatacttagatacttattcctgtcgctacccattccatgttccttttgtcctcagccagcacttcagtggcctttgtagtgacccaaacttttattcctaaagagtttgagtgattactgtttctggctaatttgattgcataaatctgtttgcttttattgctaaatatagggatactaggagattcctagaaaatccactgggttccagacatagtcctccttacagagaagcagcaaccttattcctattgataaccaggatcgacatctgggctctttggttcagtggctacataaatggttccaattcagtggggccattgtgttttctggttgaatcggccctctctcttcagacccctaaaacagcagggctgaattttctggactgaagcaagaattctataagtagatcattagcagtaacagagaggatccattactgctgtcatctcttggctcctaaatgtgaatttcagctatgggagaaccagtactatatattggtcactggtctagagcatcaggtccttcagtaggataacccaccagccctcaaggtttttgtcacatggctgtatctttaatggagttttaaacaggcaatttcagtattcattcaggacaactttttagggtgatggggtacatggcaacatagcaataatgatgcccaatcaacctgttttcttttctttgcctttcttttcttttcttttcttttcttttctttctttctttttttttttttttaaacggagtcttgctctgtcatgcagggtgcaggctggagtgcagtggcatgatctcagctcactgcagcctccacctcctgagttcaagtgattcttttgtcccagcctcccgaatagctgggattatgggcacacatcaccacacctggctaatttttgtatttttagttgagacgaggtttcgccacgttggccaggttggtctcaagcccctgacctccagtgatccacctgccttggcctcccaaagtgttaggattacaggcatgagccactgcgcccagcctcgacctgtattcttgtaaaagagattccctgatcagaagcaacatgaagtggtgtccaatggcagtaaagaaggcattgtataaattcacagatgctggatgcttgaaaaatcttaataatcaaagaagaaaaatccatgtccagaataagtgtctatttctagtaaggaaaacatcaccaacctgccacattggaaaggactgtgtatcagttagggtcctagcagaaaacagatgacatccccaagggttaaggaaaatttaataatgggccatttacaatggcatgattcagggtgcggaaaactcataaagataggttcagctggggagatgttacccacttgggcctgaggttggggagcagcaaggagcagatacagagctggagcacctgcttatacaagaggcacccaccatgggagtgctggctttagatagaggcaacctttaaggggggacctggggagtgaaatcctctgctccactctgctcttgtcctcagccctccttcttgtgttcaccattaatctaaaccacctagaagtccgaggataaaggagcctgctgagtagtccccatgtagtctccataggtcagcctttggcgtcacgagcatgttagaaaaggcacaagtcaagtagtgagtggtaagtggagctggaggtctacatagaaatcatctactccacccttttcgctgggcagcctccatcccatcctttttccagatgaaagttcctaacacaaaagacacacaaatttccatcggctgcctattaagcaggggatgtcaataagattatcctcccttctcaaaacttaacaattagctttcaccaatactttcatataatatttcaaggggaatgcataaaagaagtaataatcggcataaatcacagctgctctagtaaccccttttgtagctgggcatgaggccagggttggtggcaaaggaagctgtgttcagatgcccctagctgcaagacaagtctgcctacaagaaggaagacttcgatatgtagatttggagtgtggtttccttcacccatattaggagtgtgcacgtggaagatgcagttattaggaatacaggatcagaaggcccaaggtaaaacacttgcccttccccaaggaatgactgcttcatccaaatactaaaaagtctcatgaaacaaaatcatctccaaagggagcctggaatgaagctactgggcattggccaacttgctaggactgctggaagaatggtgcatggggacagaggtggacatttcactcaggtagggggagctatcacctgtggtcagaacccagagacaaggggcaatttcatcaagaccaaattaaaacattgagttatgtttggtttgcagctggatggaattttatatgaagtaacccagtccattgaccctaaaatcagacctgggaatgaaaagtagagggactggaatgttatgttcaaaagtcccccttccttcatccctcattatccccattctctaatacactcctttgacaagtaatggctttgctccaggagggagggagcctgatcctaactgatccatcacattcagaagaggagtcctacccagagttaggcctctttccaattagcctggagactggacctcatcactagaatgtgtcactgggataggacaatggcaaacacacgtcttgagaacagaactcgtatagttaggattaaaactgagggtggtggaatatctgatcagtccacagacttgggtatcagtgtccttcaaaaatcatttgggggcaattaggacatccttttctcttgtgattaccagatacatgtgactaccagaaggctggagaatacacgtttagctgatgtagacatactaaagcctgaggacttttgcagagaaagccctgtccagatgatgatctgattcagaaaatgcatacccactccacttagactgagtaaaatatagagctagttcaagtctaaaactctgtccttcacctaaggagataaaatctgaccgggttctgtccatcttctatttttaaactggccaaagaggtagggacagaaagtaaccaagtatccacagaaagagttaggaagagctaatcttagacagagacaggctggtgacactagccacatctgagtagctagcaccagtgtggagatagcaggtcagatgggagctgcaatggaagcgtccagcttcaggtagcagtgcaggagaactccttcccaagcctgtattcattgtctaaagctgctataaccagttaccacaaattcatggcttaaaacaacacaaattacattttatcattcataaattcaaaatgggtcttgctgagctaaaatcaagatattggcagaagtgcatttctttctcgagactcccagggagaatccttctcattagtatttccagtctcacaaggccatcctctttcttggctggtgaccctttttctttatcttcaaagccagcgacaataggttgtgttcttacattgtatcactccaccttttatcctcttccttctcttccacattttaaaaccttgtgattacactgggctgtcctggcttatgcaggatgatctccatatttcaaggttggttgttttgcaagctgattttgtttccttagtttttcttgccatgccaaataacacactacaggttctagggactgtgctgtggacatcttggggctggatagaaaccactattctacctaccacaaattcccttaagaagcaacagttgaacaaacagggccctggtaacctcaacacagggatccacctggatctagtatcatgaagaagaaaaggctatctcactcaaagaaagtgggaaagtggtaggagagctgagttttccctgagccctaccacgatagggtcacaccaagccaaccagcactttatttttcccagaacatcaagtaggtcctcaagtgaagtgcctacaaaaatataagaggttggaactaaaagtactaaatagtgggtcacaagtgacaggtgtgttcttgacaataaatgacagagagctgagccactacctgaggtagaggcaggacagcctgggccaatttggcttaaggagcaaaacccacccaaccatgcctgtgtggtcatctgtaagggaggatgcagaaatgataagaaggaagatagcatgtatggtaagcaccgaagcaggagctggggaatgtcagggctgatggagacaacttccattcctcaatttttgtcctaggttggttcccccataagccaattgtgaagcaaagatttgagaataagctttcatgggaggtgataccaacaaatactgctatgggagggggagtatgacatgaaagggaagccagccaatgtagtgtgcttttgtgagcaggtcattcatggggaactggaactatatccatgaagacctctaggagcattttcccatcggagggtgagagaagctggggcatttatctatcaactttcacttatcgttgaagtcttctcccaaggcattaacctcccatcacttttggcctgccctgcatgtgggcctagcatgtctccccagccagtggaagcctagagcagggagcaaaatgcatgaatgataatgaaggatctgagcacagcatcagtagcatctgctccaaggatggaggaaggcaggatgggaacttcccaggctaggaagggttataaacaagaagactcagaggttcccgatggaaggctcaggattgtcccaagggttcttttcagagttctagcccagtatgtcaagcagcatgcagaaacgaatacctaactactctttatatttgcctcccatgtgcagacacttcagaaaggtgaaggctgaacaaaggcacacagtaattgtgcacagtaattgatctttcggggtggtatgtataaagccctccccaccaaatggagtcagagagtttttattttgatagctcctcagtaatggacagtggaaggaaaaggatacatggaaaagaatacttcagggatgggatttaatttgttttcagactgtgagtaatacaggacagaagagaataacattttttccagagaaatctaagccgtgttcattgtctaatatcgaagacttgcaaaaacacattgaacagaggttaattaagagtataatatctgaatcctacagcactataaatcctccattgtcatggtcaagaaggaatatagccagcacaaagcccataaaaatgctaaagaagattagcacatttctgcttgaattgaggacaccttggactgcttgctaaggaacagtagctttaagtaaaggactcgaagagtgtccttagctggttagaataaagacacaatttgccttcatttccctgttggcttttaccaatttacaaagaggccttgaggtaaaggaaaagattaatgaggatgtgaaatatataacagcatttgtttatttagatgagataattattttcaccagcaccagaagaatagaagcaaggtcctttggatatctggtcccctcaggaaaatagtttaatattgtcctcagacatgggtcaaattgcctgcacctttgttagtggacacagaggtcccagtctggagacagcattgtccttgaaactctatccataatcaacaattgccatgaaccaattgtagcaaactcagaaagaaagaaaaattgcttcagaggtttatagaggtttttagagtattcctaaattacagacctcacaatatcttaaagcagggttgaatttggaaggctgagcccttccaaaaagaaaggaaaagatcataggataaataatactcattatcatcaacccgcctcaatccattaattataaagaattttaaactatcttagggagttttatccaagatttgccgaggaataactccaggttggtaaggcacccagctatttaaagcagattttttaaatgattaattctttttcaaataattttattaagttcagcggtatatgtgcggtttgttacatacgtaaatgtgtgttgtggaagttttttgtacaggttatttcatcatccaggtattaagcctagtagcagcagttattttctccaccctctgacagtgtgtgttgttctcctctatgtgtccatgtgttctcatcatttagcttcacttagaacatgcagtgactgattttctgttccaaccctagtttgctaaggatgatggcctccagcttcatccatgtccctgcaagtgacataacactctttctcccttcttttctttctttcttttcttttcttttcttccttccttccttccttctctctctctctctttctttctttttttttttctaatggagtctcactctgttgtccaggctggagtgcagtgatgccatctcagttcacttcaacctttgcctcctgggttcaagtgattctcctgcctcagcctcccaagtagctgggctcacaggcacccaccaccacacccagctaatttttatatttttagtagagacagggtttcaccatgttagccagactggtctccaactcctgacctcaggcgatccacctgcctcggactcccaaagtgctgtgattacaggcgtgagccaccgcaccaggcaaatattgttcctttttatggctgcataatatatcatggtgtatatgtaccacattttcttcatccagtctatcacttatgggcatttaggttgattctatgtcattgctattgtgaacagtgctgcaataaacatatgcatgcatgcgtctttataatagaatgacttatatttctttgggtatatacctagtaatgagattgctgggtctaatggtatttctgtctttaggtctctgaggaattgctgcacaatagttgaactaatttacactcccaccaactgtgtaaaaacattcctttttctctgcaaccttgccagcatctgttgttttttttgactttttaatagtagccattctgactggagtcagatggtatctcattgtggttttgatttgcatttctgtaatgattagtgatgttgagcttttttttttttcatatgattgttggctacatgtatgtcttcttttgaaaagtgtctgttcatgtcctttgcccactttttaataaggttgtttttctcttgcaaattagtttaattcttatagatgctggatattagacctttgttagatggataacttgtaaaaattttctgccattctgtaggttgtctgtttaccctgttgatagtttcctttgctgtgcagaagctctttagcttagttaggtcccatttatcaagttttgcttttattgcaattgcttttggcttcttcatcataaaacctttactcatatctatgtcctgaacagtattgcctaggctgtcttccagggtttttatagttttgggttttatatttaagtctttaatccatcttgagttaatttttgtatatggcataagaaagggttccaattccaatcttctgcatatggctagacagttatcccagcaccatttgtcgaatagggaattctgtccccattgcttgtttttgtcaggtttgttgaagatcagatagttgtaggcatgcagtcttatttctgggttatgtattctgttctgttaatctatgtgtctgttcttgtaccagtactatgctgttggttactgtagccctgtggtatagtttgaagttgggtagcatgatgcctccagtttcattctttttgcttaggattgccttagctatttggactcattttttgttccatatgaatttcaaattagttttttctagttctgtgaagaatgtcaatggcagtgtaataggaatagcattgaatctataaattgctttgggcagttatggccatttaaacaatattgtttcttcctatccatgaacatagaatattttgtttgtgtcatctattcgttttttttttttttttttggtttttttttggaacagtggtttgtagttctccttgttctctctctttcatccccctggttagctgttttctcaggtattttattcttttcattgccattgtgaatggaatgatattctcaatttggctctcaacttaactattgttggtgtataggaatgctagcaatttttgcacattgactttgtatcctgagactttgtagaagttgcttataagactaagaagcttttgggctgagacaatggggttttctatatatagaatcatatagatatagaatcatgcctctgcagtttgacttcctttcttcctatttggatgccctttatttctttctcttgcctgactgccctggccagaacttccaatactatgttgaataggagtggtgagagagggcatttatgtcttatgccagttttcaaggggaacgcttccagcttttgcccactcagtatgatgctggctgtggatttctcatatacaggtcttattattttgaggtatattccttcagtacttagtttattgagagtttttaacgtgaagcgatgttgaatattgttgaaggccttttctgcatcttttgagaataccatgtggattctgtctttagttctgttttttgtgatacatcacatttattgatttgtgtttgttgaaccaaccttgcatcctggggatgaagcctacttgatcacagtggataaggtttttgatgtgttgctagatctggtttgccagtattttgttgaggatttttgcatcaatgttcatcagggttattggcctgaagttttctttttttgttgtgtctctgccaggctttggtatcaggatgatgctggctttatagaatgagttaaggaggagtccctctttttcaatttttttggaatagtttcagtagaaatagtaccagcttttctttatacatctggtagaattcagctgtgaaaccatctggtcctggccttttttttttttttttttttttggttggtaggctatttatcatttcagaacttgttatttttttttttactctaaaagtcagatatatttttaaaagatcatgcttataataagcaaattacatagtaaggaaacatcaaaataaagtagatgaataaaaaggcatacttgaaaaattcaacagcagaaaggacagttatttttgttttgtttctaatgcctgaagaaagagaaagagacatgaaaactattttttcaagtgaaggtttctgtctgttgaagtagttagcattggcttcttttctcctgtgtccaaagcaggcttttcctgcactggcttctgaggagttgtttagtcttctgccatgtacaggcaatacatcaaggcaacggccactgttgagatggcagggatcacccagttggtccaccagctggaactagaaacaacagtagcgataaaagtttctgaaagcttgcttaacttaagtttatcatctggatggaactcctcaatgatatatgttttggacaattccctagcatctgtagagtgcccaacatcctcaaagtttgcagtagcgtcacctccagcttcttcctttaagacttcttctgttaagacttctttcccaccaggatgctcaggtgttcaatttcttcctggttcagtcttgagagggtgtatgtgtcaaggaatttatccatttcttgtaggttttctagtttatgtacagagaggtgtttataatattttctgatgattgttcatatttctctggagtcagtggtaataatccccccatgtatctgtgtttatttcaatcttctatcttttcttccttattagtctagctggtggtcaatctattttattattttatccaaaacgccagctcttggattcattcatattttgaatgttgttttgttgttgttgttgttgttgttgttgttgttgtttctattttcttcagttcttctctgagcttggttatttcttgtcttctgctagctctgaggtttgtttgctcttggttctctagttcttttagttctgatgttagggtgttgatttgagaactccctagctttttgatgtgggcatttagtactataaatttccctcttaacactgccttagttgcatcccagagattctggtgttgtatcattattctcattcatctcaaagaacttcttgatgtctcccttaatttcattatttacccataagtcattcaggagcaggttattcaatttccatgtaattgtatggttttgagtgaatttctttgtcttgatttccagtttgactgtgctgtggtctgagagactatttgttataatttcagttcttttgcatttgctgaggagtgtttcatttccaattatgtgatcaattttagagtaactgccatgtggcaatgagaagaatgtatttctgttgatttggagtggagagttctgtagatgtctatcaggtccacttgatccagagctgagttcaagtcctgactatctctgttgattttctgtctcgatgatcggtctaatattgtcagtggggtgttacagtctcctactattattgtgtgggagtctaattctctgtgaaggtctctaacaacttgctttatgaatctgagtgctcctgtgttgggagcatacatatttaggaaagttagttcttgttcagttgaaccctttaccattatgtaactcccatctttgtcttcttttatctttgttggtttaaagtctattttgtcagaaaataggattgcaaacctctgtaaaacatattttcttataaaatccttcagcaatgtggaaaaagcccacaaggcagctagttttcaggaactcgggaaagtctagggtgaggcttctgagcaggtgtccagggccttgggaggctgtgtagacctgtcttgacacttgatggctctgctacagttttcattacctatggaaaccagcttcgtgggtctagaaggagataatggcaaccaaacgcaaaagccaggattgacctaagcaagaggcttgtgccatctgggcactgtcaagcagttttaagagaatgtgctgggtgcctcttgggttacagactgacgatgtgttccccagtgctgagcaagctgctctaatcactggtgagtggttgcattggctgaccaggtattcagtggtgctcggagatcaagtcatatctcaacaacaaagtcaatcaccctacctgtggacaggtagattgtatgcagattgatgagacaacttcccccgcagggttggaggcaatttgagagtctagtgaacacgtttgtatggccaagcattaggaggcatcccaccattttctctcccaggtcatctcacttagttctggggaaatcttctaccttccttagagcttggactgactcaaagctagaagaggtgacaaaaagaagaatgaagcattcttggctaaaatatcctggactctctccaggcatttaaaatttcactttatcactaaagccaactagaaaactcataaaacatttattgtaccatgtgttgccaggtccagcatgagaacagcagaattaattgtgttgttccaaaggagcattcctcaagtgcatctgctatcagctggtagtggtgatttaagaatcaatcgaggtttctgccaatggttgactaaactcatctggaataaaatgtgcataaatgctggaaaaatattttaacaaatacttttaaatgcatggcagctcttacgagaaggtaagataaataccctggtgtcaagaatcaagtgacagcaggaatcccaggagataaacaagtgcaaaagctgtcagctgagttgggaagtctacctttccaggaggcctgcactttgttttaacagcagcaagtgttggcgtggctcttgcagatagagaactaagtgggaagagatgcgtttccagatatcaaaatattataaacgtatggtaataagagtgagatttcagtatatatagagaaaaaaatatcaagccatggaacataaggaaaagctgagattctgatccacagaaacaggatggggcaatttcatatctaaacaaagagcaagcatgcacacttgtttcacaccatgcaccttagtggattacaggcttcaatatataaggcaaatgttacatgtttagaagtacatagaagagtgtatccttgggagttcagggtcagcaaagattttctcaagaaaatatagaaatataaaccatgaggaaaacagtgacacattcagctgctttaaaactgagaacttctctcttcattaacagaaagtggaaaaatgtgtgccacacaggtcaatggaaacagattgggggtggggggggtagagagagagagagggagagagagagagagagagcccacgagcttctcagatcaatatcaagaaaagaaagcctcaagggagaaaaacagcaaaagatatggactggcgtttcacagattaaaaaaaaacacagtggacaagaaacattaaaaacgcgcaacctcattagttaccagagaaacacaagagtaaatttcattgcacacacacttgttggcaaaagttaagagatttgatcacacccagtgcctggcaaggccatggagcaatatggaacagttataaattactggttgaagtacaaatcatgaaaacgtggcattatctaggaagtttaagctgcacatgcccttccataaagcaattttcagacctggtggtatatactggtgactctggtccatttgctctgtgatgtgtgtctaagaatctttaccacagtgtttttcttatagcaaaaaccctggaaagaacccaaatgcctattgataataaaaggacaactacttcagggcagtggctacttctgggggtgggggcgggcagtgatggggcccaggtggaatatctgggaacaagtgatctgtttcttaaactgggtggtgggcatgttaatttctattttatttctgtactttatgatacatatgtacatgctgtgattatgtgtatcaaatacaccacagtttaaaaatcatttgaaaagatctgattcagtgctcatcattgggtgggggcagaatcaggaaaccaaaagtcagagacagcccagtgcgaggcttggagagctgtcttccacttacaatggcctacacaggcagctcaatgccaccttcccactgaagtcacagaacccaactactgaagcccaggtatattcttgcactgactgttcatatcataccctctctacaagcccacttcacctggggtcaaaaggtacccaccacccaccaaagcccaggcactttttagctcagtggctttttttctagaatacatcaggtcacccattaagttgtcgaggatttggagaaataatttagccggctggaatccagaaatccaagattgttctctatcacttgcatgagacccactgtttaagttctttctctgaaagtttctctgctcagaaggctgggcacactccccttgggcagacaggacgttggagtcgcatggttccaatccctcctgcattaaaacttctgagagcacttccacggcttgcagggagtagccagatccagcacccagcctctcttgtctggccctcagggagccagaggacaatgtccactggtatccacactcacccttgctgctttttctgtcccaagtaatcctcaggggaaaggctgaggacagaggacccctgacatcttcgtgatggaggctcatagagattgcaaatagtttcttcggtggaaacaaaaagacttatcaggaaggaaaaaaaagatgtgatagggtgacattggtgtgctctctcctgaaccctcaatcaattatttttcctctaccctaagagcctcttatttcctctccatccccaacacacacacatacagacatacaaacacatgcatatgcatacacacacatgcataaacacgcatgcacagttcacggagccagacataactcactcacactacagagaaaaaacaaaattttcttgacttgaatttttcaccctgagctaaagaatctttaagcttgagcattagagaatgtcccagcatcttcatatctacaccatctgaattcttaaagagtttatgatccccagaagcctggctaccacacttctcctgcctgtctcactgccctgcacctccatctggacctcagccactctgaacaatttttcttccagtcacactttctcctgccgcagagcctctcacagacagatcctccaaagcaaggcctggaacactctcctctcaccctcagcccttaaacatccctactcctcatccctgcaacccaacaccatgcagctttggtttctttttaactttcctttgtcctcagcccacctctccctgcacattaaaaaatcatttggccaaagccgatgaaatcccaagtgcccagaccaagtgacttccataaacaaaggcctgctacaacacactgtcttctgagctgtgagtggccactcgtgttgtgactctgcatgactccaaggaagggttgctggctttcaaggctgccaagtgtgagaactgggatgattgcaatctgtcattttgccagatgagaagctaagccaccacttcctagttgttttccatctgggccaccttgccagaactccctgggacctaggataaaacagatggacagcccttcacaaaaggcttccataaggtgaattggaaggagacccgggcccgcagcagcaaccacaagctattcccattgcatttaagctggctctgagatgccaccacatcctccaattttatgctttcatgattggcacctgttggaatgcataagctctacactcctctggaaagactgacattgagtatgaaatagaaatattaagtataggagccatatcttgaggaaaggcaatttctctctgcagagatttccactagtttcccctactccctacccacttttatgcaacaaaacaaaaaaataaaacatgctgaagaatcaccttttgtcaggtatggtggttcatgcctgcaattccagcactttggggggccgaggcaggaagatcacttgaggccaggagttcaagaccagcctgagcaacactgtgagagcttgtctgtacaaaaataaaaataaaaaagtagccagttgtggtgatgtgcacctgtggtttccagctacctggggaggctgaggcaggaggatagcttgagcccaggagtttgaggctgcagtgagccctaattgtgccattgcactccagccttggcaacagagaaagacctgtctctctttaaaaaaatggacttttctgagcttccatgtttagaatatctacactggtttgcagcaggaacagaccagaagtttcagaaacttcaaggatctcacttcttgtcaggcagtcctggagttagagccctttcctgctagacccatactcataacactcacctgtgcgtccttgttttaccttctggagctgcacaaaacccagagacacctttgcacaagacagtgcttctgataactagacttttcataactcccatgaatattagattttctgagaacaatattttctgtttctttggtcattctctgtgtgatctgcttcttagactgctcgttagtttattttgtgaacgtgtctctcaaaaggcgccacccatccctgcccctgactttcaataccacctgagcaagagaaaccatttagacaagtactttccctagaggagaatcaacttccctcctaaaatctgcaacactttaacagctgcagagacagcctctatgaagctcgtggtctgctcaagtccaaagaccctttcgtacctgcattccccattctctgcttgtggaattgatttcagactttaaaaatggatgttggacatcatagtttgggtttgaacttctttttctggtgcagtaaaatcattacaagcttttagtctacctttatattttctgtcttttttaccactgaggaaacttttgggaaaaggagtgtctcaaaatactaaaagtattaatgcaactccaaatagccccgcagtctaggcattattatacagctatggaaacacaggcagagtataacaaaacacacttttgttttccctcctttcattccactaaaggaaatcctgagtagaatggataagaatcctctatatcaaaacagatggcaatgacacagcctcaagtaatgagggtggaagctggtgggtagacacctgagcctcttctcccctcaatgagacaacccatgtcctgtgccattttccttagcatcctgagtgtccatagtcatgactggagcaatggcgctcccttgtcttctgtgtccttttccccatgctcatcctagtgcttcttgggaccacctcccaaataagccatattcatccacatctccattttgggttttgcctctaggaggggacctagtctaagacaatgaagtcttagattcttaaatgaatatagagggaaaagaagtgataaataccagtgaatgtcagaacactccaaagacgaatttctgaattctgcaatacctacaactatatgttaaaccaatacacagagaaaattcttcttttgaatcataacacttggtttaatttagtagaaagtttgagttacaaaatttgtttcagacaatgcagctttgcttctcttggatatatgcagtttctaggactttatgcatcacacacagcagtaacccaccacagtcacattcaggagtggctaagaaccatctgtgaacagcaaactgtctacagacagtgcatctccaagcctgaaagatactcgctctctgatgttgtttatgtggcctctttaaattattcaacaaactttctcacttaattaaattcagtacagtccttgatataggttggatacttgttcccgctcaaatctcattttgaattgtaatccttagtgctggagggggggtctggtaggaggtgtttgcatcatgggggcgtatccctcatggcttagtgctgtcttcacgatagttctctcaagatctggtaatttaaaaagtgtgtggcacctccccgcccaccctcttactcctgcttttgccatgtgaagtgcctgttccccttcaccttcctccatgatgataagttttctgaggcctctctaggcgctgaacagattccagcactatgcttgctgaacagcctgcagaactgtaggccaattaaacttcttctctttataaattactcagtctcaggtgtttctttatagcaatgcaagtgtggcctaatacagccctctgccaaaatatcaaaaatttaattgtggtgtctgaattgaattatggatgctttttggtgttcgaaccagagccctcatggaaatactgaatttgagtcaagttcagaggtttccattaggactgtatttagcgttcactgctgatgaagccgaggcccacagtggcttcagcacgcccgccagggttgggttggctagcatggtcatggcggagcagacaggaacagcattcctcatgtaaccgtctggacaaaagtcaagctggctacttcttcatgttggcagaaatcttaattgcagagctgcatgtcttccctgccctccaggtctacaagcaccccgccacaggttcctcccacaccatccttcttcttgaacagcacagagtcccctggacattctatgattctataactcctgactccagcctcttctcttaagcagtttgatttttctttcctttcttttcttttctttactttttggatgctcattaatgggtgatgatgattttgatgtcattctcattacccaggcctcctaaactttgagttaagcatgaatctgaaaatgtcctggtgcgtaacaggattacttggcctttgagtgttaacctaacttaaaccaggtgcactagcaaaaaaaaaaataaagataaaaaataggaaaggaagaattgcatatttcctttaattgttgaaatgtaaagttcaaatataggagtaagtttgaggtcaggtcttttttctttataattaggactagttggtcatctctaaaagacgtgtgtctcaaaagttgaacaaccttagtttggatgcactagaagtcttcagaacagagatttggtggacaagttggtataagccttttttaagagagaagtccaatgagtttttttgtaattaaatgtcatcaagccaggctttaaaaataataaagatctccattatcaagatttaaaacagattaataatgccccaaatggcttcttcttgccctggcctcacgagttcacagaaatccccagcccaggagatgccacctcatgattggctgcagtgctgttgacgtccctgcactccttcactctctgacttcgaagttcccttaagtaggtgagagacaaccaaccctcatctactccgctctgacttgtcagtgtgcttgggatccagaagttggccattttcctactatgacatgtattttctgtgttatttgagaatactcaactttgctctagaaaataagataaataatcaaataagggtgacagataaatctaagtgcagaagcaggtggcctgcaagtcacaaagacttcagtgactcaagctgatcgtgtgtgtgtgtgctcccaagtgacagaaagggatgggagggccagagaggtaaccagcatttatgagatctgaaactgaacccagccacccactggtgacagactttctggctccgtgtgtctgtcacccaaaacacacagacaggagtcatgactggttgcaggtcactgggagctatagctgctggcctgacacacaggcccctccatctcctgagcctccctctggtccttgtcactccccatcagcaggaaaatgaaggagcaaacataggaatacagtaactgggtgcattcatcccgctggtgctccatctggagcgtgaaacttaccccatcacttttctgttgcttcttactgtgtttttaaaagccactctgttttatgacctctggggcagctgcctcaaagttacttggaggctatcattgcatcaaaagaatttcccacagcacagagatgggtggcatgtcccagggcacaaggcctgttagaaacctgtcctgccccatggttcagatagtaactaaagggcatggaggcagagtcagaactcaagtcagagatgaaaggcgctgaggttccatcctttatccctgcatgatctcacttcataaatgcttatgacataatgtgaagtgaaaaaaaggaaaatcatagcttatatagacaatagaactcttataaaactgtttccattatagataagtaatcatatttatctgtgcatttacatacttactgagcaaatgctagtgtgttagactgaatgttatggaagtattttttcctctgaatattgaaaacatgcattactctaagtagatatgtattaatgtatgtataaacactgaaagatgctggaaacaagtacataaaaatggtaaccatgggtgataggattattgataatgtttggtttcttattcattttttaaatattttaggaatttctaaaagtcaacaagaattgttttataattgaaaaaaattataatgctactccaaacatgcccccacaactcagatttttttttttttttttttgaggtagagtctcgctctatcgcccacgctggagtgcagtggcacgatctcagctcacagcaagctccgcctcccgggttcatgccattctcctgcctcagtctcctgagtagctgggactacagatgcccaccaccacgccgggataatttttgctatttttagtagagacagggtttcaccgtgttagccaggatggccttgatctcctgacctcgtgatccgccctctttggcctcccaaagtgctgggattacaggcgtgaaccaccgcgcccagccacaacacagatttttacaggagttctaaagcaggaaaagggccaaactcacaacccagggaggtttgatcctttaaaatcataattacagttaggcaggaggaatcagttaaagcgatcgattgtacagcatgatgactatagttaatggtgatatacagcattcttaaaaaacacaaagagagtggatgttaagtgttctcaccccccaaataatgcatttgttaattagctagagttaatcattgcacaatacagatacacttcaaaacatcattctatgcacaatgaatacatacaatttcacttttcaattaaaaaaatcaaatgacagcctccagccatccttggaaggtctcattcaatatagcaggcatccctcccaagatgcatcactctcatcatttgctggcctgcacccaacaacttcccgttctttctagtttccacacttcagtctgtgttagattcttaggctatgatatacaaagattgatgctgcgtttgtcataggcctccttttatacttgagtagtgctaaaaatattaaaaactcagtcaatacgtgtcagcaccaggccacacacctacaattagccccttgcccaccagctcacatctttccatggcaactcagttttgtgcaaaccactcatgccaaagacggcaggtgggctgttctcagggtctgttgatggggaaggagtagaatcatgatgccccacatccttccacatgttctcatgtagtttctgctcgcttatcccctctaaatgtagtggctcaaaacaataacaattactttactctctcatagtttctgtaggtctggaacttaggaagagctgggcaggtggttctggctcagtctcttggctggagttggaacaggttgggggatcagagggctagagaggctgagggctagctggacagcattgtcggttcatgtggtttcgggactgctccatgtggtttcccaacatgggatgatgtgggctcccttctagcatggtggcctcagggccgtcagactgcttatgtggcgtctcagggcaccactcatgagtgttccagcaggaaggtagaagctgagttggtttttaattacctagacttggaagtcaataaggtcatctctgtcttactcttatggccaggagagtcacaaaagctctctcgattccaagtgccaaaggagacctagactctacctctcaatgggacgagtgtcaaagtcactttgaagaaagaacatgagtgatagatatattgttgtggccgcatgtgagaaacacactctgccacacaggtgctgtggctccatcgaatatgccttgtgtctactcctactcagtctttgagagccagctgcttatatattcggtctggtacccttcttgaacttccttttaagaataagagcatcctcatcaaaatccccttatcccattccacacacttgcattgcacacttgcctctttttcttggaggaattcacatgttatccccagcaatcttgcaagctccctggagggttggggccttgtaacgttcatattgtcttctctctgttacctacacaaaaatgtttttaaaataacataagaattcttaataacacaagaagtcctgaggatatcaataacgagagacaaacacaggactccaaattgcacaccttacctggtctcattgatatggaaggggtgggaagttaaggaggcagacactaaacagctcatggtggtgatttctgggaacagaaattattgaagctttgtaatttattatctacaaactttgagttttcagtaataaacaagtgttctcatttatttaaaaaatcatgaactttgcagaatgcggtagctcacacctgtaatcccagcagtttgggaggtcaaggtgggcagatcacttgtggtcaggagttcaagatgaacctggccaacatggtgaaaccctgtctctattaaaaatacaaaaaaattagccaggcatgatggcgcatgcctataatcccagctacttgggaggctgaggcaggagaatttcttgaacctgggaggcagaggctgcagtgagccgagatcacaccactgcactccagtctggatgacacagaaagactgtctcaaaataatgataataataaaacaaaaaaaataaaattcgtgaacttgcattttattacccaaacccagaatggactaaatcaagtgacattgtgtctacaaagtattgtttctcaaaattcacttccatctagatgagctatgccatacaactgcatcttttatctcctctcactcccctccacagctacaggcatgagagaagagcaagtgctctcctgaagcaaagtctttaaaaagctcccaacccaagagttgggacactgacaggcttacattcacttttccagttcacccatggtatgtgtttctgttctcacctcagtcttgagttttccagatctgtcttaaagtaaaagagaaaatccaaagtccctgcatatctctttactgcatgctgtagaatttttcttcctaagttatttctgagtcaacattgattccttcccactgaactgaattatggtgtttcaggcctagttagtactttaatgatgttgaaatcaaagagtagaagttttcacatgggtattcacatgaaatattccaggacatgattattaggttctttgggtttgatagctgcccttgatttacagtcccttcttggcatccaccatgcctgagaataacagattagccacagtcatacctgttttttttccagagcatataagaaaaattgcttcaataaaaattaaaaaaaaatctttgccatcaaccactcccgtcctcccccaagcaaatgttcatgctagtatccacagcatagcgagatgggcatagagaaatggcagggtctctaagctaattcatttctattctttccttctctcccttgcatgtttctaactctgcattattttcctctaggccaaggtaaaagccaccctctgcttttatagttgcaatgagtttaaagacttgagcacagcagacttggaaaagtgctgtagtaggaagcagaagtgctgggctctatgcttccaggcccttgtacaggaaaggtggtaggacaattggttagagcccccatactgccactgaagggaacttttgtctgttaggacaagtcttttctttttctaagagggagagaacattattttcatttctgtttttcccagaagccaatcctgagacacagattacagtataagtagcttatctgggaggtgatgactggtaggaaagtggagaagagagatcaggtaggaaagccagttagtggagtgtttgttaacaagcaggggaccggtaggtagctgaagcttggttctgctggagaaatctgctaccacacctcagagccatcccacatgaaatgggagggagctggggtccttaccctccaccccactagccactgagttgagggcagctctggagagtcactgtttccagcacttcctgcctgtcatgcttgggcagagaaaactctggtggccagaggaaacagggaggtaagaaatctaggtgctaatggttgggagggagacttggaggcctccacttcctcactagtgaaacatcaatgcacagattgagctcacaggctactgtgtggttgaaacaagatgataccttcaagagcacaagcttggtcttacagaggaagcagactgctagtgtcctgtgagttgtttgcttacctactaaatagctagatccaccaatacattcaaaaaaaccaaactcatacaaaccacacttttagacaatagcaccataaaagcagaaatccataccaagaagatctctcaaaaccatacaattacatggaaattaaacaacctgttcctgaatgacttttgggtaacaatgaaattaaggccaaaatcatgaaattatttgaaactaatgaaaacaatgataaaacatgccagaatctctgaggcataactaaagcaatgttaaaaggaaagtttatagtgctaagtgcccacatcaaaaagttagaaagatttcaaattaacaacctaaaatcacacctaaaggaactagagaaacaagagtaaaccaaccctaaacctagcagaaataaagaaataatcaaaatcagagctgagctgaacaaaattgagaggtgaaaactatacaaaagatcaacaaaaccaaaagttggttctataaaagagtaaataatattgatagactgcaagctagactaataaagaaaaacaaaaagagaagattctaataagtaatcataaatgacaaaggggacattgccaccaaccctatggaaatagaaaatcatcagagactattatgaacacttctatgcacacaaactaaaaaacccaccagaatggataaattcctagaaacatacaacctcccaagattgaatcagaaagacattaaaactatgaacataccaacagtgagttccaaaattgaatcagtgataaaaagcctaccaatcagaaaaatccctagaccagatggattcataacaaaattctaccagaagcataaataagagttggtatcaattctattgaagctattccaaaaaaattgagaagtagagactactccctaacttattctatggggccagtatcattctgatatcaaaacctggcagagacacaatgaaaaaagaaaacttcaggccaatatccctgataaaaatagatgcaaaaatcctcaacaaaatattagtaaactgaatccagcacacatcaaaaagctaaacccccacaatcaagtaggctttattcatggaatgcaaggttggttcaacatatgcaagtcaacaaatgtgattcatcacataaacagaactaaaaacaaaaaccacctgatcatttcaatagatgcagaaaaagattttaataaaattcagcatcctgtcatgttaaaaaccttcaacaaactgggcatcaaaggtatatacttccaaataataagagctatttatggcaaacccacagtcaacatcatactaaatgggcaaaagttggaggcatttctcttgagaactggaacaagacaaagatgcctattctcaccattcatattcaacatagcactgcaagtcttagtcatagcaatcaggcaagagaaataaataaaaggcatctaaataggaaagaaggcagtcaaactgtctctgtttgtagacaatatgattctatacctagaaaatccaatagtctctgcccaaagactactagatctgataatcaaattcagcaaagttttagaatacaaaatcaataaacaaaacccagcagcatttctatataccaagctgacagccaaatcaagaaccagtctcattcacaattgccacaaagagaatacaaatacctaggaatacagcttaccatggaggtggaagatctctacaataagaattacaaaacacagctgaaagaaatcagagatgacacaaacaaatgggaaggcattctgtgctcgtggataggaagaatcagcactgccaaagtgaccatactgcctacggcaatttacagattctaagctattcatacaaaactaccaaagatatctttcacagaatcagacaaaacaaccccattaaaatgtgggcaaagaacctaagcagacacttctcaaaagaagatgtacatatggccaacaagcatgaaaaaaagctcaacatcactaattattagagaaatgcaaaccaaaaccacaatgagataccatcccacaccagacagaatggctgctattaaaaagtcaaaaactaacaaatgctggtgaggctggggagaaaagggaatgcttatacactgttggtgggaatgtaagatagttcagccattgtgaaaagcagtgtgtcaatttctcaaagaatgtaaaacagaattatcatttgacccagaaatcccattattgggtatataatatacccaaaggtatataagttgttctgtcataaagacacatgcacacatatgttcattccagcactattcacaacagcaaagacataaaatcaaactaaatgcccatcaatggtagactgaataaacaaaatgtggcacaccatggaatactacagagccataaaaaagaatgagatcatgttctttgctgtaatatggatgcagctggaggccattatcctaagtgaactaacgtaggagcagaaaaaccaaataccacatgttctcatttataagtgggagttaaacattgagtaacagggacacaaagaagagaaaaagaacagacactggggccagggcctacttgaggatagaaggtgggaaaagggtgaatattgaaaaactgcctcttgaatacttgtgctctttatctgggtgacaaaataatctgtgtaccaaacccctgctatatacaatttacccatgtaacaatactgcacaggtacttcaaacctaaaagctggaaagaaaaataaacaagtaaatgactagagccagaaggccatgtctcgtcaaaatagaagtgataatacttgtctaatactttttgaacacctttgctgaggtatgaatgatatacaaaatctgcatgtatttaatgcacacaatttggcaagtttgggcaaatacagacacctgtgaaaccatcaccacaaacaaggggtttctattacttaatatacttttttttcctcttttatttaaaagaatactcaaaaaagtgtttgtttgtttggttttttttttttgcctgtgttcttgatgtaagatatatattgttttctttttttgccaaaggcacactaattctgtttttaactttctaaaggatgataagacatcaatcttgggtgtttgggtctttcaggctgtaattgccttaactatctaattcattgcagtgtaaaactcttttctggcattttttctcttttcttgatttttaacacaatgttttagttgccaagactgcccacccactcccataagagagttaagaagatgggttgtcttttataaattaaagaaaataaactaaaagaaatgtgagggaagaaggaaagaaaacccaggctttcttacaaaactaaatttttctctaaagcaaaatttcaaattttggaaatgtgtggtcagtactaaagacacaggtcaggattcaagtgggacagtttgaaatgaccttaagtaagacaacacaaaatcctcatctgttttttcctttgatgttagacttacttcatctttctgttgtctcctaaaataatgtagactgattgaaaggaaataaagatctccttcagtaatctgtttttccttgtgtatcagaagcagcagtggctggcagaattctgctataagctataaacattgatttctcagccactgtaaaaattaaagaattgtttcttgtttgaaatttggaaacatttgtgctcagataaaaataattttcatgagaacaataaggacaatttttttttttttttttttttaagagatggagtcttgctctgtcaccctggctggaatgcagtgatgccatctcagctcactgcaacctccacctccggtgttcaagcgattctcctgcctcagcctcccaggtagctggtattacaggcacacacgaccacacccggctaatttttgtattcttagtagagacaaggtttcaccatgttggccaggctggtctccaactcttgaccttgtgatccgcccatctcgacctcccaaagtgctgggattacaggcgtgagccaccgcacctaatctaaggaaagattgtggaactggcttcattttccacgcctccaactcactctgcgtattcacctccttcctgtctttaatggtggggggtatggcatgctggctaactgggctttctgattaattgcacactgtaaatgtaactatattaaacactctttttcagctgaagaagatttaattcttccctgatgatccagaaatgttcataattaagaccagcaattatacgaatgggtttcacaaacattgggttatttgaatggatgactcaggctctgaagaatcgtttccagctgaaggagcattggaaaaccatagataacatattgtcctgatttagagagcctgaagaataggctcaaaggacacagagaccacagagggcaccttaccactcacagagaggagttggactgctgggactcccagcaaaaatattctccatgacaaatggaagtacaatcttctggtcctcccctacccccaatagacacacgattgtaggtgagggcggttttggaaactcaaggggcctcctgaccctgccgcatgcacaaggccaaagcaacccaggaagccatcttgcctggacgcaggatggagaccactgaatccaggccaagttccacacatcaccagcagtgatgcatgagaggtgatgatgagggcacagcacccaagacttcaacagactccatcaccttgcacagtttgagtcaaggacattcctcaattcagagctgccggcctggtgtgaaggccatttgcccagcccttgctggaagtcatgctaccagacccttagagcctgaccttgccagggccttccttcaggcttgcatgagtgggtgggagggtggaatcagcagtatcatgaataaacactgaccaatttcctttcctgctgaggcacttttagaaatattcttgcactcttactatgaataagatggtgattacaagtattatagtgctttatctgttcacaaagtttgagagatttttgtcgaaatctggacacacccataaaagtgtgccacacttgagacccttgttctttatacatgtggctattggaaaacattaagaccactatgtctaccagatccagcatgatttttaaaaactccattataagtgaagatgacactcaggaatggaaacttacagcttatccactctgccaagaaatcatgttctctaagagtgagagaaaagagatgctgtgtgtggtcacttcccacttttttcttgttccacgatcccctcctctccgagtttcattcaccatccgcaattgcagacttcttgctctgaagattgtactagtaagctttctgtagcagacaccactgaagccttactgttttctactaggccagtgttgctcaaatgtggtccttcgaccagcagcacatcaacatctcctgggaacttgtgagaagtgcagactttggcctctccccaaacctcttggataagatcctgaaatagaggccctgccgtctgtgtgtttgccagccctgcagatgattcggctgctcactcagactgagagcagtagccggagatgctcaccctcccacgagctccactgcttcctgccgcgggcccctggggctccgttgaggtcttgcttaggtgtgctcacatctgagatgcgctcagaccactaacttcagctgcgagccaggtcagaagtgctgaagagttagtgccctggggaacagctctcaagcagagagggacaggacttggaaaataaaaatgcagctccctcacacatgagatgagacgattttcaggcatgttccacctggttcttcagaagtccccatcaggactgaggcccggttgtcacagatgtggcctgctcattcatgcatcctggattgcctttccctgtctcacttccccactcctgcatgggtgcttcctgagatcatctcccaaataagctgcttgttcccaagcccctacttcaggctctatttctgggaaagccaatataaggaagatgttgtactatgaatgaaaattcatacatattcttaatgccattctagtatcatcaggtttaatttccagaacaaccctataaggcagaagagattggacagtgggggaatgtgccccaagcgacagagtccttgccggtggagctggaatctctacccctttttgagctgatgggaaacttgtacagatacttccactttggaacattggccaaagtgataaagagaagatcgagatgaattttaatcaaggaattagaaattgagaagacccgacttaggagccctcactaatttggctatgttggggatctgatgggtttggtaataatgtcaggatccaagaacctaccagtcactgtggcagatgcaggaaagaagtaggcttccatggtatgggtttctaaacaagtttcctttgcttctaaccattttcttctaaagtaaaccatgacatcatgctttgctgcaaatatgcattaagccattgctgcaccaacccccactaacctcagtgggtaaggcaccaggttcaacaggccaaagaagagacccagacccagcaaacaatacatagggtattattaggggcttacatccaggggagagagtccagggtctgcaggctggacaagatattctcatggcttagtggtggcaggctggacatgagaacggtaactggttgcaaaaaccatgcagtttatacagcattttcattcaactccctccccttaatgaactgcacctggcaatcttcattttttttgtttttttgagatggagtctctctttgtcacccaggctggagtgcagtggagcgatctcagctcactgcaacctccaacttcctggttcaagcaattcccctgcctcagcctcccaagtagctgggattacaggcacacgccaccaagcctggctaatttttttgtactcttagtagagacaggatttcactatgttggcaagactggtctcaagctcctgacctcaggcaatccgcccgcctcggcctcccaaagtgctgggattacagacgtgagccaccacacctggcctgggaatcttcatttaacccaagattgagactcagggtctcaatcccctggatggctcatgtttcatgggatggacccggggctcagatgtcacacataggcaatgaacgaatctccaggttgaccaccctcagattccctagctccgaacacacattcaggtgcatctcatctcccatacagggtcattctgagggtatgctcaagttattgctatcaggtgtgtttaccctacagctcttcactgataactattacagaaagtgaaagggaaaaatgttctgaatcttacaaggacatatagttcaagacagccaatgaataaataatgggcagagagtaatgttgttataaggagctctaaaactagctctaattttaattaaggaaagaacttctaagcattggcacttttatgctcattgtaatgtttttggcacatttcccattgggtagcgtcgcacaggtatgtaaaggaatcccaggccgctagcctaaatcagtactagaggcaagtttttcaatgagaatggtccagcactctatttagtaatgtgagtttccaattgctatgagtaacccaggatgatagcatgttaaagacatacagagatttaaaaatatattctagtctctttatgaaaaccatgagaaaacagaggttttccagtgttggggatcaccctgagagtgcccagcaggaggttagcaggagctgcaatggaaaccagattccaagcttcactgctttccatgtgattccatccctccagcctagaaatcggagactcatctttgaccttccctccttttccttccctaaatgcgatcaccccacgtcctgtcattgtgtcatttatgaatacagtctcttccactccaattctccagtccctctgaggtcactgtcttttgaagctcaccacttacacttgtgtatttacttcggctgacaccagcttgtctttatctgcttcaacccgccttgcattccatgtctacacttgacttcccccaaacattattatttattcttcttttataaagcaaggctgtcctaagacttagaggtagacagtcaaaaggcaattctaataaacagtgattaagtgcgataacagcagactgtaggtgcccctggtgccctccccactcccatatatgctgatgttttcctgctgcgggccccagtgacttcctgatgctgtctctggctcagaaaggggctccacctgcaggtagagcaggcaggcagtgccaagggagtcatgcagcagggagctgagctcaaccagtgatgtcggggagtcagtgagaaaatacctcaacctcctcacccttctggagaagggctctatgcttctctttgaggtctccagtgggaaaaagccccattttccatggtggtaagctgtgtgaaaacaccctgtatccacttgcttctctttcctcttccattctccactcctcacctggcatttcctgggggtcacctcccagataaactgttgcattggaatccttgtctcagaagctgcttctctgggaagctaacctaagacaaaacccaggactggggaaccaggggaatcaccccagggaatgagagccaagatgaaacctgaaaggaaagaaggaacccgtccactaaagcaatggcaggtgttggagagcagtgtgggaaccaggttaaagatctggcagggctgggaggggcaataagcatgacttgcttgagcgaaactaaaagaatttcctggaaggtgatttcctagaattttgctgcaacgtaaaatatggggcagtgaaaggggaaagtttaggtgcaacatggactataacctaagacccttgggagctgtgttctttatgttaagaacaatggaaaatcacagaggggtttacatgggaaaggacaatgattgtattgacattttaagagatttatgtctatagatccaattagattggagtggggggaagactgcaggctgtgcgatcacataagaagctattagaggcaggcaggcaagaaagaatggaattagcagtgggaatgaaatgactggatggatctgaaggatttgtggacagtggaaacaaaaggatatgtgcctatttagaggtgctagttgtgagagaaggaggaacccaggatggccctaaaaccatgactcatgcaactagatgggcaagaggatggaacaggggaagaaagctgggggaggagctggtgggttcagttttgccattgttgtgtttgagctactatatgatgttcacatagcaatgttcagttacacagtggtattatatgggtctgaagtttaggagaggggaatgtgctgagtttggaaataatccatatatacagaggctaaatgcattcataaaagaggataaaatgtttcagggaaacattgttcatttgagcagagagtgagaagagacaagtgccaggagaagtatgagaactacatttaaagggcggatagaaagcaacaaaggaggcctaaagggaatggccagagaggtgagaggaaagccaggaaaatgagaatgccacaaagggcaagggaagaagcagttatataaaacactgccaagatgaagttcagctatggactaaaaatcctacgttacatttcaaggcaaggaaatctttcgtgacttggggagaacagcttctgtagaggggtggggatacaagatggtttccatgtgactgagaagtgagcgtaaagtgaggtgggtatagacgactttctatacatttgactctgaagggactgggagagatgaagtaacagagatatgggcttttaattgtatgctatgacaggaacatagagggtgactgcagtaaaaggtgtggagctgtgggcacttgatttctaggggaacatagaggtgatgagtctaaaattatgcctgttttggaagagaagggttggctcatctgagagtcacagcgtggagatggctctgatcctggagagtgagttggatgaaaagagaggctctgatctaagaagctgccattcaagttgtaagaacccagaggaatatacatagcagtatctacttattcacaattatcagcagggacagatgtcgtgatgagtttgggggtcacttaaggagagaatgggaggagaaatccctgtaaagactggagatggacagttgagggagctggaagaagctcatggggagacgtgcatgtattcaaactggacgggggtgcactgaggacgtccacagtgctccacagacccagggaggtccatttgtgtagatcttctgaggagagtccagaaaggtgcactgccctttctgccctctcgacctctcttttaaagtcctctgttttgcacccaattttatttttttcctctaatactacacctctggcttccacctgacagagacaccgtttgttagaattgtgagcctgcaggggtgtcccagccttgccagccagcatgcttgtgtttgattgtttccttactgttccctgctatgagtaagctgacccatcctcaccatctcacaaacccacagagaacaactccctcagcttacattttggtctctttcctggttgatgtattaggattacattcaattgttccttttctgtggccatcaacactacaaacaattgctattataacttgtttcaatggtcaatattattttaattaaagccatcctgggaacagctggactcacacaggtaatggcagggaaggggtagagggcaggtagcatcaaggcagaacgtgtgtgaaggatggccagggtccagcacagcttcctccccatttactaagtctctgggaacgatgtcccagcgactgagccaacgcttgtccaagtgaaatatgttagttgcccttcacggtgtttcttggtctctgacttgtgtcctctgatttcctgatgaagtcacactcacaacctacatttgcctggcctgcattgtaattttgcagtaccatacactgttttaaaagtaaactgccaaaaatgtgtccttagtcactagcatcactgttatacttctgagcttagggtgagctcagtagtcatgatgcaaaggcatgtctattgtctaaaaaatggccatcttagacaatagaggaatacagaagaatatgcttaatgtgatttatttattcaaaatgatcactgatgccagacattgtgctcagtctggggatgaaggaagagataaatatgaatacaatctctgtctatcctcaagaaactctttcactggcatggaagaaagatttatttaaaaattcacaatatggtagtctgtgccataatagagctttgcataaacatttttgggacccagtcctaaatgctacccatttattaacaatgaaaatcatcattttaaatgagaaatcatcagatattataagaaaccaatttcagtatgaaatcaattagccgttttctgataagttcttatttttaaattattgagtatatattttatgcaaaaataatattttttgaggtaaaaaaattgataagcaaggaacatatagtgattaagagtttaaaattaaaaaatttatattgattctatagtaattgctttaagtatcaaaaagaatatggaaaatatttttggctatcccctattgcatttaataattatccaatataatgtatatatactgtatgaatatataacttatttaatataattcctcatactaaaacattagttttactaattttagctaactctgagtttccttatgtattcagtaattaataaattatatatagcctatatttttttccatgggttattgtggtacaggtggtgttgggttacatgagtaaattctttagtggtgatttgtgagattttggtgcacccatcactcgaacagtatacactacaccctatttgtaatcttttatccgtcaccccccacccacccttcccccaagtccccaaagtccattgtatcattcttatgcttttgcatcttcatagcttagctcccatgtatcagtgagaacatatgatatttggttttccattcctgagttacttcacttagaataatagtctccaatctcatccaggtcatgcaaataccattaattcattcctttttatggctgagtagtattccattgtatatatataccatagtttcattatccattaattgattgataggcatttgggttggttccacaattttgtaattgtgaattgtgttgctataaacatgcatgtgcaagtatcttttttgaataatgacttcttttcctctgggtagatccccagtagtgggattgctggatgaaattgtagttctatttttagttctttaaagaatctccacactgttttctgtagtggttgtactagtttacattcccaccagcagtgtagaagtgttccctgattaccgcatccatgccagcatctactgttttttgatttttgattatggcaattcttgcaggagtaaggtggtatcacattgtgcttttgatttgcatttccctgatcattagtgatgttgagcattttttcatatgtttgttggccatttgtatatcttcttttgagaattgtctatacaagtctttagcccacttttgatgggatggtttgcttttttcttactgatttatttgagttcattgtagattctggatattagttgtcagatgaatagattgtgaatattttctcccattctgtgggttgtctgtttactctgctgactgttcctattgttgtgcaaaagctccttagtttaattaagtccctgctatttatctttgtttttattgcatttgcttttgggttcttggtcatgaaatccttgcctaagccaatgactagaagggtttttccaatgttatcttctagaatttttatagtttcaagtcttagatttaagtctttaatccatcttcagttgaattttttttttttttttttttttttttttgagattgagtctcgctctgtcacgcaggctggagtgcagtggcatggtcttggcttactgcaacctccgcctcctgggttcaagcaattcttttgcctcagcctcctgagtagctgggattacaggtacgtgccaccatgcctggctaatttttttttcttttttttttttagtagagatggggtttcaccatgttacccaggatggtatcaatctggccgaggtgatccacccgcctcggcctcccaaaatcctgggattacaggtgtgagctacggtgcccaccctgagttaatttttgtataaggtgagagatgaggttccagtttcattctcctacatgtggctagccaattatcccagcaccattagttgaaaagggtgtcctttccccactttatgtttctatttgctttattgaagatctgttggctgtaagtatttgggtttatttctgggttctctattctgttccattggtctatatgcctatttttctaccagtaccatgctgttttggtgactatggccttatagtacaatttgaaatcaggtagtgtgatgcctccagatttgttcttttcacttagtctctcttcgactatgtgggctcttttttggttccatatgaattttagtgttttttttctaattctgtgaagaatgatggtagtattttgatggggattgcactgtgaaatggggattgaccatgtgaaaatggtcattttcacaatattgattctacccatccatgtgcatgggatgtgtttccatttgtttctgttgtctattatttctttcagcagtgttttgtagttttccttgtagaggtctttcacctcctcagttaagtataatcctaagtattttacttttcttgcagctattgtaaaaggggttgagttcttgatgcaattttctgtctggtcgctgttggtatatagaagagctatggatttgtgtccattaattttgtatctggaaactccactgaattcttttatcagttctgggagccttctagaggagtgtttagggttttcgagataaacactcatatcatcagcaaacagtgacagtttgacttcctctttactgatttggatgtcctttatttcttactcttgtctgattgctctgtctaggacttctagtactatgttgaagaggagtggtgagagggggcatccttgtcttgttccagttctgagagggaatgttttcaacttttccccattcagtattatattggctatgggtttgtcacagatgactttcattacattgaggtatgtcccttttatgccgattttgctgagagttttaattataaagggatgagggattttgtcgaatgctttttctgcgtctattgagatgatcatacaaatttgtttttaattctctttatgtggtgtatcacatttatttacttgcatatgttaaaccatccctgcatccctggtatgaaacccgattgatcatggtagattaactttttgatacgttgttggatttggttagctagtatattgttaaggattttagcatctatgttcatcaaggatatcaggatatcagtcttgttttcttttttggttatgtcctttcctggttttgatattagggtgatgccagctacacagaatgaagtggatgaattgggggggtcctctttctctatattgtggaatagtgttaataggattggtatcatttcttctttgaatgtctggtagaattctactgtgaatccatctcatcctggactgttttttatttggtaatttttcgattaccattttaatcttgctgcttgttattgttcaggttatctaattcttcctgatttaagctaggagtgttgtatctttcctactagagaggaatttatccatctctcctaggttttccagtttatgcacatacaggtgcccatagtagccttgaattatcttttttatttctgtggtgtcagttgtaatagctcccgttttgtgtcttattgaggttatttggagtttttctcctcttttcttggttaatcttgctgatggtctatcaattttctttatcttttcaaagaagcagctttttgtttcatttatcttttgtattgttttgcttgtttgtttcattttcatttagttctgctctgatcttggttatttcctttcttcttctgagtttgggtttggtttatctaatcccttgagaagtgactttagattgtcagtttgcactctttcagtatttttgatgtaggcatttagggtgatgaactttcccctcagcaccccctttgctgtatcccagaggttttgataggttgcctcactattgttgctcagttcgaagaatttttaaatttccatcttgatttcgtttttgacccagtgatcattcaggagcaggttatttaatttctatgtatttgcatggtttcaaaggttccttttagagttgatttccagttttatttcactgtggtctgggagagtgcttgatataatttcaattttttaaaatttattggcctatttattggctattaaaactattggtctgtttattggctcattttatggcctatcatatagtctgtcctggagaaagttccatgcgctgttgaatagaatgtgtattctgcgattgttgaatggaatattgtgtatacatttgttaagttcatttgttctaagatatagtttaaatccattgtttctttgttgactttctgtcttgttccagttctcagagggcatgctttcaacttttccccacttggctctatttttggtctggttggcctcctgctgagaggtggcactttcccgagagtatcagctgcagtagtatagagaggaacttgtggtgggcagggccctagaacttcgaagagtatataccctttgtgttcagttacgagggtgggtaggcaaggaccatcatgtgggggtggggctaggtgtgtctgaactcagactctcctcgctctggtcttgctgcagctgctgctggggataggggtgaggttcccaggtcagtggagttatgttcctaggaggattgtggatgcctctgctgagtcgtgcaggttgtcagggaagttggggaaagtcagtagtcacaggtctcacccagctcccacgcaatcgaaagggctggtctcacttccaccatgctccccctaacagcaccaagcctgtttccaggcagtgggcaagcaggcctgagaacttgccccaggctacccacctcccagctgcaacagaaagtaggactttagttctttccctgcctgtggagtctgcatgctggaggattcgtgccctccccaagttctggccaggaggcttctccgcccattcaaattgttacaaagttcagctggggatttccttctccttgtggcgttttccccacacctctggccaccctcctgaaggatccctgtgatgacaggcaggaatggcctgcttggggacccagcaagctcacagggcctttcctgctgcttcctctactcctgtatttcactcagctgtctacgttgactcagctccaggtaagaccagaatattctcctgtaaactagaccttcattttccccagtgggggtgtgtgttcaggggcagaggatccccctttcccacttccacagtatgggcactcacggtatttggggtgtctcctgggtcctgcaggagcaatttgtttcctttacaggatccgtgggtcctcttggatttcctaatttattcctgcagtcgttctggagctaaaattcatgatgtgagcctccacacactgctctgtctgagtcagagctacaatctaataagtaataaataaacttttttattttaaataattttaaatttacagaaaaattgcagaggcagtacagacacttctggtataccctttacacagcttcccataatagtaacatcttacattaactatggtacatttttcaaaactaaataattaactttggtacaatattattaactacattctctactttatttgaatttcaccagatttcccattaatgttctttttctactctaggatcgcccactgaatttagttcttctgactcctgctctgtatttctcagcctttccttgtttttcacaaacttgacaattttgcggaatgatggtcagatattttatagattgcacctcaatttggcttttctacatttggttatgaatagactaggaatataggttttaggaaagaatgtgatcgaagtgtagtacccttcttattatatcatatcagggagtacatgatatcaatgcgatttatcactggtgctgttaatcttgaccattgattaaggtggtatccgccaggattttctactctaggtgcactattttccctttccatactctgctctttggaagtgagtcattaagtgcatctcacatttgaatggaggagaaagattacattccacttgttgaagggaaaagcaccttctatattatttgaaattcttctgtaaggacgatttgtctctgctctccatttgttcatttattcagtcgtttatttatattgtaatattatagactcaagtgtgtttattttatgctttgggtaatccaaacactatgctatttatgaatttttatcagaacatggatgaggaagtgcttacttaggctgcggaggagttggggaggtctatgtcttaagggtggtagtgtcagatagagcaggaaagaacaacagcagtattagctaaggggaaatcatgcctaataagatagtttgtcaatatgctggtttctgtttttgtttttgttttgttttgttttgtttttgagatcttgggcttccttttcaatgttgatctgttaaaggagacatgatgtgtgactatgtctgcttctatatttgataatgatttacataaagagaattaagaaaggtgagaaaagtggcctccagcaagatagagacttgcctgaggtccaaaagctagttgaggacacagctgtggaaacatccagataatgtgcctctttggtatctaagcaacagcactcctaacagccagtgtacacacacaaccctgtgctccaagacagctgtgttgaagacatctttgaagctgttgtattcttcagttatgatagtaacatgttctattattttttcttgtgaaagggggttgaatcaccatgtgtggctcatgctcccctaatcccacatgtgtgtgaatgtgcatgtgtgtgaacctatctacaagtctggatgttcctcagaatccttgaaatcaataactgaactcactgtcttcctggtgcccttctactgtactttctatcttgatcaatgatgcaatcattcaatcaggctccttagaaagaaatcagagtgttatttttgtattaatctctacacattttcttaaattctgcattaggaagtcctgttgattctattttttaaacactgattaatacctcccctacttctccatcactacagccccttgtaaaccatgactgcctttcatttacatcccaagattgggtcacaactcaaaactcctgagtttttccactctcacttccactccactgatgcttcactgtacagctgccaggcaacccatctaaagttcaagatgctcaagccattctgtgcttagaagcatagggtggctctctattgcctataaggttaaaaatgagacaaagataaactgccttgtcctaaaatggcctctgctttctcatctgtggtccccctcacacactttctctttttctgtctcctccacataatttaagatccattcttaccaaactcaccatcttttaaaacttcatatacgtccatgcctctaagatctttgcttttcctgtaattctcattcttctttgaaaacctactgaccctctaagaccttgctgttcaaagagtgttctgctaaccagcagcatcaacaccatctgggagcttgttagaaatacagacgcttgagttccacctaagaccactgattcggaatcagcatttaaacagcatctccaggtgattttcatgcatgttaaagactggggatgctacactaagacatctcaattgttagcttcctgtggtagtcttttctgatgttcttctccctttatcaggtgcccaccttcctgttctctgcctactttgatgttgcatagaaatcattggttgatatgagattcttgaaggaaaaagagatgtatcatgttcaactttgtagcctcagagcctatgttaaggctcacttccttttgttccataaacagctactaaacacctgtgatgggccagccacagtgcaaggtgatgaggatgccagtggtcaatacgtggcatggtccttgtttacagtttgggcttgaagaaaatattcatcaaagagaaacaaagacttgaatagcaatcttcacaagcagtctgagtgcaaggtgccaggacctggagaagctaaaaaacatttattgaccctggaactgtcccagggctccacagggacacactatgtctatttaaggccatgctttacacacatcagtacagaaccaagaagacaaaagtgcggggttggtaatcacattacctacccatcaagtagctgagactaaacccaagaatatcaccaatgaaagagatattagagttacagctgctaagtacccactgtttgattctcattttcagaactgctgtcctatgacttttcatcttttgtttaaatcctggcacagtcggagaactcggcacaccattaaacaattcatttcattttcagtttgctctggtatctgacctgctcctcggcctgcattataagtccatccatacttcttcttctagcctcccagatagtcgcctgcctcaagtaactatcacagtcatcttcccactcacttcttccccattggtaaatcttacaaattcaagttgcccatgaaggattcttgtattttatttttattattattatttttttgagactcactctgttgcccaggctggagtgcagtggtgcaatctcgtctcactgcaacctccgcctcctaggttcaagaaattctcgtgcctcggcctcccaacatagctgggattacagatatgtgccaccacacctggctatttttttgtaattttaatagagctgggttttcaccatgttggataaactggtctcgaactcctggccttaagtgatcaacccaccttggcctcccaaagtgctgggattacaagtgtgagccactgcgcctggccaaggattctttgtcaagaagttaatacgaaggcaatggagcttcatcctgtgtgggacatctgacggtgacctagagtcagtccacctgaggggcaaaacccattcatcatttgtcaaaggctgtttttcagaggtgtatttcttctctggcacttcgggcttgacatgcaaacaaagcacgtatgttcctacatccagaacaaaagcttttgcttgtagaaatgagttctgagaagatatgagcaaatttccatgacatctgttacaaggggaaggacgtgcacccaagtgtgctcatcgaagtacaaatctggcccctggagagcagaaacagaagctggttttacagcattacttttatgaaacaacattgaatactctaccgcccacaaaagtagtgtaaatagcaggtttttccatcagctgttgtcaagacaattctgttttaacaaccgtagctgtttctatgtttactctctttggaatggtcacactcacacccaaggtcactcaggcaacatagacagcagatcaagagtgagagaaatcctttccatcttttctcctcttctagggggtactccatactactagctgcccagcctgcatcaccccagacatcaggagtggctgctcacagaagaccaaggcagattggaataatggaaccccttcatcaagacccctctgcaccgtctcttagtcctagtaccttgagagagtcgtttacgctcttggagtgtccctgcatttttaaaggtgttagcatgaagaacaaggcaatagacatagacaaggaagctgttatgagcacagatctcatgggaaaagcaaaactttctgctgtttttgttcagaaatacagaaattttcaggaagatcttttatgaaggtgataacactagggtccctactcaggacaccagctgaacagacaagatttccctgttacttgtggtttggtctgttaagcacaatcccacctcgatgctgccattaggcagatagtttatgcgtctctccaaacttcccagtggagacctttattttcagacttggaggactgggagtgtggagcacagaggaaaaagaacgtgaagttctgactaattacgagctgggggagggatgaagcagtgagaaaatggtgattttgactgtgaaaagttcaactgaattaaatttaaacttttaaaagaaggaatctacaaatgttagacaactatgtaagggagtatttagttctgagttggtttaaaacccattcttcatccagtacccgtaacaaacaacagaaaaagcatgctgacatttcttagcaaaaactgataaaatgagtctaaccacaatgacatttttccagctggcataatcatgagtcattcctttctctgaggacttaatgtcaccacaaaagcctctaacttccccatatttatcatttggaaatgaaaactgtttacttgtcatgcatgccaaagaatagattaaactgataaagaaaattataagattaataagtgcaatttacttgtcaaatggaggtatttcatcatttcatgaagctgttccctccagggactccgtgcactggtgtttcgccacagagaccaggctgggaccagtctaaagacagtggttggggactggttggccttactgttatggtggaaaggagactccttccagctcttctttggccaccaaagaagaaaacaaagaaggactctttccttatactccttaagttaaagaaagattcaagtatattgctatagtaaagggagccacaaaaagaaatgagaacaatctagacagcaaaaacagggaggataatctgtagaggctgcccacatttcttaaatcaagacatggggggttaagtgtaacatggtaacacctaccagacagactaaaatatactattaatcctccaaattaccaaaaggcacacacacacacacacacacacaccatacacactgaaaaagaatgaaagaaaggcaattcctagagtaaatgagagaataaagaatatattgaaaacaaattaaaatcccaaaagttaagctaataatatgtaaaagataaaaagtaatactcgagtaatgcatttagataaaataatgctaataaatgtatacatgataacatgcctattggagaaaagacttgcagaatgaggtacatacaagtgggacacataaagtgaaaatgatgaagataaaccaggaaaatgctaacaaaaagaaacctagagttcaccataaaaatattagacaaggatgaagttacatcagaaagtgataaactagagaaaattgggttattaacacagttacactgagaatgcaatgctttttatgtaccaaataacaagaagaaacaaaaacccataaaacatatgatctaggcacttctagaataaatcaaccaaaaacagaagtagtaagatactaagtcatctatatgatgtcatgattgatgaagtggatacaaattcacaaattaatcaatgcggtagagcagtggctctgaaacttgacccagtctccgaattcagatgtgctcaagcacccatcactgggcccaccctggagtttctgcctcagtagtagagaagaaggggacttgagaatttgcatctgagaagttcccaggccattgtaatgctactgggctgctgggcctggggtcacactttgagaatatggtgtggaggatcaaaaataataacaaaatttaaccaagagacagatctcagtatgtatctctaaccacagagaaagaacagtgtacaaaaaatttgtccacttattaggccacagaaaaattctgaataaatttaaagtagaaatagtacagaatgaagctctgatttcaggtgataaagttgaaaatggatagactcaatctcttggaagcatggcatataaaaacagatggagttttgctaatctctctcacagaaaatgtgtatcctgaaatacttacataaatagacagaaggtgaatgaataatcatctaaccaaagaaaataaatctgaaaacagcatgtatgtgtgtataatataattattttaggggaagaactagattccagtagaaaagatttactttttactctgaacttttctatactttctgaattctctgattatgcatgtgtacgacttttaaaaaaaaaccaggccaacaagtttcatttgagtgtgaaattggggaccttttgatttttgctcttgtttttctttcaatttccgtgcattaagtgttagtttttgtaaataaagaaagaatagatagtatccttatcctttggaagttgacttggaagaaaaataaaatatcagacaccactaagaaattcagtatttctaattgatgtgaacaagtgggagtaattctgtggtggagctggtcagggtctgagacacagctggtttccctggaacacattaccagcccacccttgccgtgccaagccctccttcccagactgcagctgccgtgagtctctcatcaggcaagtgagctgtttcatgagtagctgactcccaaaagttggctggctggggcagcttgggtgctgatttcagttcagtataacatgtcaaatgttaataattaatgctttgcatagtaattgtcaagtaggaatagtcaaaaagagaaacttgttgaagaagaggataaaagggagcaggaggtaggaagcagggaggataaaagagcgtaggtaagagttgataataaaccgtgtccaggtggaaattcagcaacaaaaactgtatgaggagaaatgacctctttgaagggtgttgaatcatgaacacaaggatgattcagcaatgaactggtagcagagatctccaggaaggatacagtttaggctcatggctccagcaacccagactctaaggagaacccaacaggcccaccacagaaacttgagttacctgtggccccagcaggaaagcagcaagcagtgggagccagagatgtcatgaaatcacttgcctaagtctgcaaaagagtcccccaggacagagaggaaatttgacccccctcctatttccaagacataggcacgttcactgcccctgggagagaaggcggaagaagaatcccatgtcctccactgttctgtcttctgtctgtggtcttagctctccccagtttctgaagtggtgaaaattttctcaaaactttccctctatttctacccccaaatttttaaagatttttctgtattcagccatgtgccaagtacatgacacatcttctgttcctgcacagtctggtgaggagcatcttctgttatccccactttatggatgcagggtctgtggtcagtgagggcagctgcttgtcctcactgacagtgagtactggagagggacttgaatccccacccatctctgttccaacaccagcacattcaagaatcacatagaactccaccctctccctctctcttcccctctccttttcctttgtgtctacttaacttgtattattgccatttgcttcttttcccctcagtgaagtgtgagactggtcagtgtttttttttttttttcttttccccctgttcgttcccaggaaacagtgaagtttatataagtctcaatcaaagcagccttccatcaccacgttccatcatctgcccaaacttctgcttcctcttgacatttaggtctggggtggagggcaaaggctgtcaccagagaaaagccagctgctcacagccacaatgtctcacatgctggtctgtcctcagatagcctgccatgtctcagggtctggttctcaacctcaaaagtttccaaagatgacaaccttctcgcagagacagggctcactagtttttttttttttttctcaattctgtaattcaaaaattgtttatgtttcatttgataacttaatttctagagttttgaagacaccttgctgccatctttgtctgcctttctggctgaacagaaggcaactgcaagaggaatacctcagaccaggaaattgagtccagagcctcacatcagcactgacgtgaggctgactaatgagtactcatcacgaacttcaagagcatgagagaaagactgcggacccattacagcttgcaggggactacttgctctccactccagtcttaaatgtcactagaggtgtcgagtgggtgggggcagtggcctccagggccttcatccctagacattctgatggctcactaatgccctctagaaaggcaatgttggattcaactctgaactctgaaaatctctagacaaagaagatggttatcttttgaaatctgacataccagaagataaggttgaagagcccatggcagtgccttaatttcctatttttcctcaaatgttttcagttgagcaaaacacattttataaagccatttctcctctaaaaatgttaaacccacatttcaaaataagagaaatcatctccttatgaatctgattcattcacacttttatgggaagtttggcaaacagaaaattggtggttcctttgttccagattgtctacccaaaaaagagggacagggtccagaggacactagactcctctcctgactcaacaccttccattggtaaggctcttgcctctttctatgaccaataaagcacagataatgactagaaaacagaggccatgagtaggatgggccactgaactggtgctaagcaagtcctcttgctcacctactcttaaaggtcattaaagactgagcttcaagccttccttgccttgccttgcctcccaccatgatcctggttgagatacattaacttttcttctctgattatctcagcagccaaatacctggtctcactgagtctaagtttgcccttctttaatctatcctcttctcactctgcctttgtttctgaatgatattgttagtcacgttatggctctgctcagggatgacttttcacctctcgatcacctgcaaaccatacaaactgcattttcttacactattacttcaaatgtctccttccacatatttccaggacaaccacagctcacctctttggaaagcatgttctttcctgcttcttcctggtctcttcttccctcacttctccctttgaaattctattctttaagggtcaatgtaaataatacctcctctgggaagtttgccagtttttctaacttgtatttttaaatgattttaaatcattttagacttacttacagaaaaggtataaaaataatacagaatacctgtactattcacacagatttcctgtaatgccaaaatcttatgtaatcatagtacagtgatcaaaaccaagaaatcaacattggttcaatactattaactaagccaagacttaatttaaatttcacttgtctttctaaaaatgtccttttaaaaaaggactattctgtgttccaatccagaatctcactttgcatgtgcagttgactccagaacgacatggttttgaactgcataggtttacttataagtggattttctcctgcctaggatactcctgagatagcaagtccaacctctctccccttcctcctcctcctcagcctactcaatgtgaagacgatgaggttgaagacttttatgatgatccacttctgcttaatgaatagtaaatattcatttactattttctcttccttatgattttcttaataacattttcatttctctagctcattgtaagaatacagtataaatgaaacatacaaaataatgtgttcatcaactgtttatggtgtcagcaaggcttcctgccaacagtaggctattagtacttaagatctgcaggagttaaaagttgtacctggattttctactatgcagggggatggcactcctaacccccgtgctatccaaggccaggtctaattgttgtgtttctgcagtcccctgcaagttgtaatgcttctgcagtcttttttctcaagctcttgacgttcatgatgagcactcatcaatcattttgtggaatgtcccacagtttggtttgtctaaggttatgtgagcctgtctgtaatttcccacaatggaagtaattattctctctctgtgctcccaccacacttggtcactcctcatgtccatgcttcctctaccatggtattaccgaggagcaagactgcattttactctctgggactctgtaatgcataaaaccttcttaacattcaatatatgccagtaaagtcactgaataaatgaataaatgaatgatgagcacaaagaaaaaaatgatcaatctttaggcaatttttaaaaaactaattttttaaataggaagcagattattcaaaaaagggaccagtccctagaaggccaaggtagcagttgcctcctatcagcctcgctcagaaaaatgaaataccaagaagggaaggcttcagtaaatggaaataatgaactgccagtgacttgaaacgctgtcctctgagagtcagagcatgtctctggtcagatgtttcagtgcccttcattccccacttgagcctctatcaccatgcgtcctcatgggaaaaatgagtgacagtaccctgttaagttagtgcttctcaggagaagcaagcctttttgcaggcacttcagttgattgctgctcatgcatatgacatgcaatagcctggcactattcagacataaagaacagaaagcctgaacacttcaccgcaacccccaagaaataaatgtcatataattaagtacttctctcttgcttcaagggggcatctttaattttttattttgcaggcaagagtttatgcaaaaaagaaagtgatgagagaagacaggtcattcttagaatgacctattgatataatgtgagatatctattcaataaatatttgtcacgtgtctacatgtgaaagatgattttggaaagggcaaagaatcaccagggaattggagctaggatgtgtttctggaactgtgtttgcttagggaaatgtgattagtaattcccagaacactttgatcctctgttgtcactgttcagccccaaactgtctgtgttttgcacagcttgtgtaacacacacactgctccgcttcttcaggcgccccacgctttatgccatgtcaggtcagataaggagacagctccaccccagtgccattatcttaggtctctctggaaacgtgtccacagaattgggatttactctgtgctcttgtctttcatcgagcttgactttcaaaatggttatcgaccagctgtttgtatgtcattctatttcatttgaagatccaaaggaaagtgacttctaagagatgaaacgcttggggaaaacttttactttcctgacaaagtggtagactggttttttaaataaaggaaactgggcaacccatttttccctttctatttgatcttatgagatttttaattacatttcatgttcaatagtacaactgactggagggctcatatttttggtacaatttatcttcatcattgcctgtccccgaatcaccaccaccaaaaataatggcttcaatatttcttaaaaacttatcttaacagtatcattgtccacattcttttgttgttattgccattaggctgcttctagtcttttctggaagtaagtagcataaataaatttataaatacatacatgtacacacatacatacatacatatatacttctaattatcatggaggcaggaaataacgaagaatcagacacaaagttgatttttgttgttgacaaagcacagacagtgaatcgaaaatttgtttctgaagaattttagaaagcagcattctctgaactcacatgaaaatgactctgtaaactttttctgctataaaaatgaagggaggctttcaaattctgacccaggttttcagatcaagacattcttcgctgagaactaagtgtaaaatacctccaggaacagtataatcatattagcctagaaaaataaggaatttccaggtgtagaaactgatgataggattgttttacacttagtttgtcagaatccagctgaaaaatgactgtaaaggaatgtgcatgcttataaactaaaaaaagttgtttcgcttaactctgatgaaatttagtttactaggaggctgtgctccctgaagaagttgtgaaatcttctaataccctatttcttcagaaacagccttccagacattaatagggaatgcatttactattctggtttgagacccaaagctactcaaaatctatgcagaaacccacaagggcccttcacactcccgagtcctcaaggagatgaaatattatgtacaagtttgcatcctagtaagatgaacaaggaaacctgccccatgaaaaagaccaccgacagaatgtaatcaaacaataataaaagcttaaataatcacaatataaacactactattaacaaatagctcgtctataaaatatacagtgataaatttcattttcctccagatttcctcaagtgtattcccgggaaaacaaagtatttctcttatctcaaataaggcataagcatgttgaacaaggctaaggggggcagaacacgaggccaggagatcgagaccatcctggctaacacagtgaaaccccgtctctactaaaaatacaaaaaaattagccgggcctggtggcgggcgcctgtagtcccagctacttgggagggtgaggcaggagaatggcgtgaacccgggaggcggagtttgcagtgagccgagattgcgccactgcactacagcctggatgacagagcgagactccatctcaaaaaaaaaaaaaaagcgtggacttgcggtgagcctggctgttgcgctgtctgtgctaggaacagtctcactgctgttctgttgaacatggtgtcactgtaatttacgataaatatcctttatcatgttgagggctttcctttctgctttctggtatgtattattatgagaaataaatattgaatgtattatatgatttctcaaaattctttaaaaaaatttcctctttatcctcttgatgaattgcggtaggttaaacagaagttaaacattgaccctgcctctttttcctgaaagaaactctatttgattaaaatatgattcttttcatataatgctagttttgatgtactagtattctatttattgtttttgcctttgtattcatatgtgaaactagcttttagttttctgttttggggggaattagtttgttcaggtttcactgttagttcatatgctcataaaatgaatagttccagagcagtttatcatgtaaagaaataatctattcccagataaaacttttctataaaacgatctagacatggaaccttttgaagaaatagatttggacacttttcagcctttgctacagtgattgatctgtgtactttttagcttcttgttgggtaaaattttggtaatttatgatttcctaaagaagcattaaattcttgtgaattttaaaacgttccggatgacatttatataaaatattcttttaaagaatactttatatctaccctcacatttattttctgctttgtggtgttgtctgttgtgctgtccatatttttcctaaagagatgtgtaagaggctgatttatttattggtctttcctggaaagaggatttggattcatttatcagttctactgtttgcttatgtgggtatttttggtgattttaagttaggtaatgactacttggtgtttataaattctttcctctaacttcctttggttcattttgttgtacaattcttcattcttaagcaacttttggttaatatatttttaaacatttctcctcattaacaaaaatattgaatgctatgggttttctttataattttggaccaacatatagtgttctcattgtctttaacttctaacaaagccataattttagttgtcatgtctagcttaacctaaggtttttttttaagttattatttttaacttggggtggttatattggtgatagaggaaggggacacgggaaattttacttttattttctaattgtattagtcaaggttctccagagaaacagaaccaatcggcctgagaacaaagagagttcaggttgcaagttccagtctgagtccaaaggccagaaccaggagagctgatggcatcagtcccagaccaagagccggaggaagccagtatcccagcgcaagcagccaggcagacagaacaaactccttccccggcctttttgttctatttgggttctctgtggttggactggaagatgcacacccttattgggtagggcaatcttctctactcagtctatcaattcaaatgtgagtctcatctagaaactccctctcagatatacccagaaataaaaccccatggcccagttcagttgacacataaagttaactattacactagtttaattgcactgtgattagagaataccactctttgaggctttcttgaaatttcctttggctctaaaacatgatcaatttttgccaatgtttcatgagcatttgcaaaatgtattctctcatcagcaaaaatgctaaaagtatctcttaaataaagtatgctaatgcagtttttaagtgatctgcatttttatttatatttagcaatatgtttggccactcctgcaaggagtttgttaaacactgtgcctctatcttgtttttatgaggttcttacatttctaacagtcattgctgcagatgcgtcactgacatttatacatgcacttatacataaacattcaagagcttttcattctctcggtagattttacctttgactttaaatgatacctcatgtgatatcaatattgatgttgctgctttctttttgtggtattttctttgtccatcctttaaatttctttgttcaatttctaaacttatttctatctaaaaataatatagtggttaacagtgaggcctctggaatctaattatccaattccccagctccagggtattactgtggccacttttccatctgactgtgtccctgttgagacagtgtatgtgaaagtgtgtgggaaaatgcctagtgtatagtatgcactgaatacattttacctgtcattctttttattacttttaatttatattataaatagcaaagcttttttcttacagtgaagcattagattttactttttatgtatactctgagtatctatatacattttaatagggtgtttttaaagccattcaaatttatttcctctaaaaatatttgaggttctatatcttccaacttttttacacttcctactcactctgatttcttactgtctcattttgtttctttcccttatttttggaattctattttttattccatttcaaagatgtcattaatttatttttttcagggcccaatgttttaggctcagtagatcatttcttttcagaaacatgaggcttgcttggcaggcaaaagaaatctgttagctcttcctgggtgaccagcactgagctagacatggtagtggggaggaatataaaacaagtacaagatacaaatcttgctgtaaggcagcttaaaatctagtaaagaacttataggaaaaataaaatgcagcaaataataagacataaactaggtttccgttaagtgttcttggaattcagaagaaagatggaaaagcagtgactgagctaccctcagaagagccaggagggtttggatgctgcaacacaacatagccatgtatccgtgtgactgcccagtggggagctggtttccaacctggactctaaaatcaacaaatgatatcttccactaaaccaaaagggaggctcagcacccactcagtacccctccatcctgccatccttgtcctgtttcttatcttggagaaaaaaaacttcagactttcattgctgagtattattttagctgtgggcttttcatatatggccttaattatgttcaagtagtttctatttctagtttgttgagttatttaatcatgaaaaaatgttgaattttgtcaaatgctttttctgcatcaagtaagataataatgtggttgtttgtttgtttgtttgtttgttttgagacagagtatcgctctgttgcccaggctggagtgcagtggcgctatctcggctaactgcaacctctgcctcccgggttcaagcgattcttctgcctcagcctcctgagtagttgggactacaggcgggcgccaccatgcctgactaatttttgtatttttagtagagatggggtttcaccatattggccaggctggtctcaaactcttgacctcgtgatccgcccacctcagcctcccaaagtgtttggattacaggcatgagccactgcgcccggctaattgtgtgttttttcccttcgttctgttaatgtggtgtattacctcagttaattttcatatattgaaccatccttgcacataggagtaaattccacttgctcatggtgtacagtcttttgaatgggttgttgaatttggttttctggtattttgttgaggatttttgcatcactatggataagggatactgatgtgtactttccttttctgcttgtatctttgtttagctttggtatcagggtaatgctggccttataaaatgaggttggaagtgttttctcctcttcaattttttggaggagtttgaggcactttggtgtttgttcttctttaaatgtttgtcaggattcactagtgaaaccatctggtcatgaacttttctttgtgtagaggtttttgatttctgattcaatctctttactgtttatatatctgttcagattttctgtttttgctttattcagccatcgttaagttgtttctaggaatttataattttaagtagattatccaattaagtgatacacaattgttcatcacattctcttataattttctaagatttctgtaaaattagttggactttcccctattttatttctgatttcaattgtttgagtcctgtttttttttcttaaacaatataaccaaagctatgtcctttttgttgatctttacaaggaatcaatctttacaaagaagcaatttttctgaattgcttttttattctctactttgtttatctcttataatctatttttttcttccactagctttggatttagttttgctttctttttctagtactttaaggcataaagttagattattaatttgagatcttattttttatatatgggaattaactgcgataaatcttcctcctcggcactgcttttgctacatcccataaattttgttctattgcgcttttatttttatttgcctcaagatatttcctactttctgttgttacttcttctttgactcattggttatttaagattgtattgtttgatttccacaaattaatgattttttgctttctttttcttagtttcaatgcaatcagaaaagatacattgcatgatttcattatttttcaatttatttgtattgttttgtgacctaacatatggtctatcctggagaatagaatattccacatgcatttgaaaaaatgtgtcttctgctgtcattaggtggactgtgatacctatctctgttaggtaccattgctgtatatgttgttcgagtcctctatttccttactgatcttctgtctggtggactttttccattattgaaagtaggagtattgaagcctcctaccattatcattgagctatctatttctacctccaattctgtcagcgtttgcttcgtatatttaggacttctgatatttgctgcatacacacatgcactcatgcgcatgcacacacacacaggcacacttctaattgttatatcttcttggagaattgaccctattatcattatataatttcctttgtctcttgcaatagtttttgacttaaagtctgttttatctgctatcagtataaccaccccagctctcttctggttaatatgttcatggaatttttttttctattttttttactttcaacatatatatgtccttagatgtaaagtaaattgcttattaaaaacatatatttggatatcctcttttataatccgttctgtcaatctataacttttggttaccatggggattacataaaacatcttaagttgtaaccacctattttaaactgacaagaacttaactacaatcacatataaaaattctactccgttacagttctgtccccgcttcatgttattgatgttacaaattacattgttatatattgtgtacccattaacatagatttatacttatttttatgattttgtcttttaaatcatataaaataattaaaagcagagttacaaaccaaaattataataatataggtttttctatgtgtttatatatttattatacctttacccgagatcttcaaatgttcctataacttttagttatgatctggcatcattttgttacaatttgaaggatttcccttaaaaaatcttgtagggtggcctagtagtaattaaatcctccagtttttgtttatgtgggaatgtcttaatttctcccttattttaaggaatgatgttgccagatatattatttactttgttcctttcttggttggcattttcctcctttcaacactttaaatatatcatctcaatgccttccgacctgcaaagtttctggtaagaaattatctcgtaatcttttaggggctcccttttatataatgagccacttttctcctgctgctttgaaaattctttgtctttgactttctgctatttgattataacgtgtttcagggtggatctctttggatttgtctaaaaaagttcattgagcttcttatatttgtgtatcaatttatgtacttgaatttgggaatttttcagccattatttcttcaaacaaaatttctgcccctttccttcttctccttccttgatctccaaaatgcatatattggtcggcttgatggtgttccacaaatcccttagcccctgtttacttttctttattattttttctttttgcttccccaacttaataatttcaaatgacctgttttcaagttcacttattacttctgcctgtttgtctgctgtcaaactcttctagcagattttccaattcagttattgtatctatcagctccagaattactgtttttttttaatttctacctttttgaattctgtttatatatcgttttcctgattttgcttaatcttctgtgttctacttcagctcattgcacatatttaagatggttgttcgaaaatctttttaaagtaggccagaggctcatgtttctttaggatcagtctctggagatttgctttgttcctttcaattggctgtgttttctctctttttgtatgccttgtaaacatttgttggaaattgggcatttgaaaaacagccaccactgccagtctttgtggacttgctctgtgcagggaaagaccttcactaaccagcctggtatgaatgctaaggggcctctccaacttttgcttgggatgcatattcttttttgtgtgcttttgtttcagtgctctgatatatatacatatgtgtgtgtgtgtgtgtgtgtgtgtgtgtgtgtgtttgtgtgtgtatgtctgctttaaagtcaatttcctaaatattctcactcctgcttcttcttggatccttaggtgctgtgttgatctgcatctcttgcactcaagtgcctatgggcctgaagttccccttgagctctctcatgccatatagcaccttctactgcttccaacagcctccaacctaatatccaaattatgccacagttcccatcaatgccttgagacaagagccaaaaaccagtccatcaaacagtccttaaacaagccagaatgttttgagaaagtttcatttctttccttacatctcaaggaaggagctgggaattgcatgttctgatgacaccctgtgggggagcaggtgggggagcagctgagcaaaatgtcacaaaatttcctaccattatgagggtgatttttcattggttaggtgtttgcttggttgctgcagctgcttaactggtttctagagttctcacaaaagtattttgctaggtacattattattatttgttgtttccatgggaaaatgagggcatgaggcttcctagtctaccatcttgccaatgtcactctgagataattctttcagaaatgtgtgaaattacattgcataactttctcaatgactcttctcagatttactgaggtctacataaagttccaagtaaaagaaactctttccaaatataacagcagacttattctaatctgaatggaacactatcttacttatgcctcaaatgaataaaaccaatcaagagttataagaacactgatttttatcaagaccaatttgtaggagttttctgacaaaattctacagtctggttcagatacatagttgatagagacatttcacttcagatcttaagatttttgttgttgttgggctaagcagggatctcatcatacccagtgcttccttatattcctgggtactttaacatttccattgatttctgtttctcacaaaaacttcttgaatttagcaatatctcaaaggacataaacagaaatctggctcagtgttaaagtgggtctgtatttttttatttacatttttctttcttttggaaggcagctctttcacaggttttatctctcccactgctcttacataaaacttttgtaaaaggtcaatttttttagatcacccagaagtccaggcacatccccttcagactgcttagagtaactggttttgcccttggcttagtaaatgcctcatacctctccaccttctgcatctcctcagacatttactatgagaatcaaaatgaaatgtgtgtgtgggtctctctctctgcctgcttgtttctctgccttggtaagacactggagcattaactcaaactaaaaaacttacttactgtctttaaatgggcttaaaattaactctgagacaaggactaaagagtaagcagttcatttgggaggtgactctaggaaatacccacagggaaacaggtaagtgaattagagaaggagaagcagccagcaaaatggcacattattgagcaagttactgctacaggcaactgcagctccatcccctggagccatctgggaaagtagatagaatactcctcagagttgtccgatcctgggttcggggaagcgatggcatttatccaccagcttctctcagtcattgactgagggaatccttctcctgaaggatattaactcccagcatttctggcccttcccatgggaaagcaggcttaggtaactagagatgaccttcagaccaagagtcgtgaatacctacagttggcatccttagcatctggactgcacaatgtgaagtgatgagtttggaaggacgcagggggtaccaatcattcctgctacatacactccttctatacctccctctatctgtggaaaaaatgacaagatctctaccttccttggtgttctccagatatacagtctgaggggccctatgagcaaaggagattatgatttgggcaataaaaaaaatcttccagttgaccttttatgttagccaaaggcatttacaagagaataaattgttattcacagagaaagatctgttttctactgaccttaaggtgtggccctgcatacgaatgaatgaatccactgttaaagtaataaaatgtctcagactatttgaagccttgtcgatgtgacctacacaaattttttaagtgtactgatattactgaagcagcagcaacaagagaagggacgttttccacatcaaaatgcaatgtacttggaatgcaatgtaatatacttggaacacatgttagatctgaaggtatttataaatacaagcactccactttcttctcaactcttctacccacctccagaaacaattgtggtgatggatgtgcttccattagctagaaatatgcttttaacttatttcagggaagaaaaattgagacaagttgaaataactgaaaaagttgcaggcatgtaatcatctctctaaatacaatggcagcctcttggtgtatctgatattttgtggcaaaataaagtgcttgatctgagaactaaagttggaaagatatttacagttaagataccatggtcatttaaagatattatgaaaacatggtattataggcataagagtattaaattgagtatttgctttttaataaagaactctttgcttattgctcctaggcagattttggcaccacaaaagccaaaacaagttttagcttctttccaattccttacccctgactctatgccaaaatccctctctcaaggactctgcacaaagcaagctcagaggtctttaatttaacttcggttgaagtgaaggatgccagtgttgtattgcctctgcttctctgtgtgttaagcaggaaagatgagaacatatgcacacctcctacagtgagaagcacaggtgtgtgtggtgtcctgcactgctctctagccccacagaagacatcaccaactgatctgggctcttgatctcaacaagccttggtgctggctcagaattctccttacagagtgatatacttcctcaaaatgagacctagctggccttccatttatatccatgtcctggatcaacaagaaaaagcaaacagccacaagtaccgagccctcttccagataaaagggttctgtcctccaaaaacaggaagacgccctgcttacatgtaagatacactcagctgactgccttccaatcatgggtactgagaaaaagggttttatggaacacaaccacatccattcagaaaacatccattgaggacctactgtgtgccagagagagtgactggtacaaaagataagtgatgtatgcccaagctttgtctcagagatcccacagcctaggaggaaagaacaagtcatggaggcagacaggtcagcggagtaagaagggcacacaggcagggccagagagtggcccaaaggcagatcctcgcagcctgaaccttgtctctggtgcttgctaactgtttggcctcagaatataacttagtcttctaatcctcacggtttttaaaaatgtatgttgtgggaatgatactctctaccagctatggagggccacgaagactaaatgaattaagcagaatgccagtcacttgtgcaaagtaaatgcacttattaatggagaaaaataattggatgagttatctatatttctagaacaagttaccacaaatgcagtgcctttaagctacacacatttatcaccttacagtttctgtagatcagaaatcaagccatggcagatctgggtcttgtgcacaactggtccttgtgcttctctcccaggtttcaatccaggtatcttcagccagggttggggcttcatctgaaggttcatccagggaggtatctactgccaagctcaggggttgctgggagaattcagttccttgagggctggactgagggcctcagttcctgctggccgtgggctgcaggcccccctcatttccttttcgcatgggcttccagtacaatagggagagtctgtgagccagagagaagtcccaggcatttgtaatctcctcacagaagggatggcccatcaccattgttgtggtttttggtcagaatcaagtcacaggggcccacactcgaaagggggaaattactcaagggcatgaaaagcagggggcagcaggaattgagggtctcctgtcacaaacacatctgaaatataatatggtgtaaattcaacaacaaatgtttatctaaggtctgttcgaaggacatgagactcaaagcaaaggatgtcaaggaagccttcctcagagagtgactgctaaactgagaatggaaatgtaagaatttgcccggaaaaccaatcacaaaggggcatacagctacggaaacaccccgcacagaggcaggcgattgtgacactgtgtgtccagtcctgggtgtcaatgataggctggcacctctctgtggcacctccctttgcctcttcaagccttggggtgatgacagcttcctttgtttctacacccagggcacaagataaccctggcaacctacagcctgatgaaaagggaggagaatctaaatgacttactgctgtgtacttggccatgagagaataaccgtgataataactcaggtaaaaggctcagaatgagaagtaggtttaaaaagtaggtaatgaagattgggataggccaaggagaacctgaagggcatatgggacagccagaaggaaagcctgtaaggctgtgggatgtaggcatttggagcctggagtgtcctgagctagagacacagaagcaggaggcattcacttgaaggttgtgtttaaaaatatgggagaggtaggagctgtctaaagagaggaactagagtgagaggggcaagacattttagaaataatttagaagaaataaaaacccaatagatcttgaataacaccatagtattttatcagtttaaaacctagtattttatagtattttatcattacaatataaatatttccctctctcttcttcttctttttttttttttttttttttttttttgtgcgtgtgtgtgtgtgagacagagtcttgctctgtcacccaggctggagtgcagtggcacgatctcggctcactgcaagctccacctccctggttcatgccattctcctgcctcagcctcacgactagctgggaccacaggcacctgccaccatgcccggctaattttttgtatttttagtagagacgaggttttgctgtgttagccaggatggtctcgatcttctgacctcatgatccgcccgcctgggcctcccaaagtgccgggattgcaggcgtgagccactgcacctggccctctctcttctttttcattcatcccacaaatactttctgagcaaccaccatgtggcaggcattgttctaggtatttttgatccaaaatgataaaaaaacaaccattgcttcttgcctcaagaagtttacattctagtggaaataaagctaaccctagtaagtaattatcatggtagtgtcttcaggtgactgtctacaagatattgattaatcacagaaagaaaatagaggacacttggcagacactgcataaacaaagtgatcagaattaacctcaccagtaatgggacaaattacttgtatggctccatgatgcaatgccctgggaacacaatgtaacctcagttgcacgtgagcccataatgcatagcttgagtctaaacacaaggaaacatcagacaaatccaaattcaaggccattctacaacatagctcacctgtaccaaaaatgaaagaaaaattaaggaactatttctgattaaaaaatactaaggtttacgaaccattcttttttttctttttcttttgctgtaaatggtcttactaggtccatgggcaaaatctaaattagatctatagtttagaaataatgctggatcaatgttaatttcctgattttgatcattatactgggataaggagggaatgttcttatttgacaaaatatgctctcaaatatttaagaataaaaagaaaaaaagtagacaccatgtctgcaacctaccccaaaggagtgaaaacaaatctatagagaaggagaatgataatgcgaatgtggataagtgttaacttttggagaactggggtgaagggtacacaggaagttctcatattattcttgcaaattttctgtaagtccaagattatttcaaaatttaaaaaagcatttttacccataaaaaccatttccagaaattttgggaatttccagagttctttgtatgtctaatcaattgcagtttatgactcaatgccaacagatgttatattaaagacatatttaaatctctaaaataaaataaccataagggaagatctgttacttaataaatgctttcctgagaatttctaaatgttcttatttgtattaagttctttaggcattggtgcttgtttgtttcatcttttggcagagaaactcctctttcaaataacattttatgcagcttgttttcatataaaactaacccaagcctgagatctaacaacctcttatacccaaagaagactctgatatcttggtgggttccctatgctttgggaaccaaatttaaacagctttctccagagaatccaggtggaaatagcttcaaaaaaagagatacttccatcttccttaatttttaaggctacatgtacttcatacatcagtgttgcataaatcaactatttatcatgttcttttttaaaatatagaactggaacaaaacacctgtctggcaacctgtaaatcattctttatcatttttcgtgtccaataaattgtttaagaaaaattttttaagatgcacagaggaaaaaggaaactcttatatttcagaccatgctgaaacaatcaagtgatttatcaacagctccaggaagatgtcatgaaattgtgaaatatgaaaggaaagggatggcttatctgagcttagatacacaagtcggttccaaaaaagcagtaagccaggagtcagacatcccagctcagtgaatagtgccctgaagtcccctgtttgagttacagtccttagacatcatttttctcatcacaccgtgttgtaattagatcggatacttcagttaaggcatcagggaaccaactcaaactgacttgtgtaagtagctccagtcagggcctaatctaggagctcttaggatgtgaccaaggggcttgttttctttagcgctgggctctgttctccatggcttcgtaaggcttcgcctcatagtaataaaatggctgcagctgccccagccctaatctctttttaccaccctgactagaggagagaaaatcttccttctaggacctctagaagagtaatcacttgccttgcttcagacaaggtcacatggccattcttacacctatcattggcttaagccagatggatcccaaagtgaccaacctcacttacaatttattcctgcttggctgaaggaaataaggattctgttgggtgggagataggaaactaggtgcttgggaagcacttcaaattgatgtgcactacacactccaaccccaaatcttcttttcttaagccattgagtggagagaccagtggtgaagttggaaaggagcaaggaagagatgaaagaaattggcctcctgaaacaagtggtcttcatagagcaacctctggaaggaggagacctccaagggcctctaaagttctctccagccctgaggctgcacctgcacaaggactctggatgtgtgtatccctgccaccatgtgggagacactgtgggagggtttttacacgggactccagatgtgtgtgtcacctgccaccgtgtgggagacactgtgggaggggttttacacaggacttcggatgtgagtgtcaccggccactgtgtgggagacgctgtgggaggggttttattcatatcagttcttcaaatcctcactctcatgccatgaggtgggtgatggcattgcacttggagaaggggcactgggcactggctggtaaaccgattggcctccaccatgcagctggaatttgacagcatcctgatccaaaaaccagttgtcagatggcaaatgccatgttcttaaccactctgctcttcatgaaaacgtgcacgatgaacactacatcatctttggaaaattaaaaaaaagcttagggggcgttcattaggagggatgttatggacagcagtgggcacagggctgttccttcctcaccaagtatctagtgtgtacctactctgcacttacttctctctccaagaaggagtctttcctcgggaagtggggacctgcccagtgccgcaagatttcctggagcctgggttggtctctaggtcagccgcttggtcttcattgtgccaatgatgctttggcagtgtggataacctacagaccccttctcagaatgatacttataaacattcaaaacacagaatcacaaaggaaaccaattatgtaaaaatgcacttatcaaaacataaaaacactgttatatgataataatgatcttctttaacaaagagctagcagtggatctaatactgaccataattttaaggtatcgagttgtgtacaggatgatttcagatatccatgaaaacagttatctgagatatgaagatacccataatctttatgggtgataaaacacaggttttactaatactaccgtagcttgctgtcacattcataaccaaagcacatgctaagtttctaaggcaagtgaaagaagaggtgtaggtttttctcctcatccaagttcatgaccctctgaaattagatgaaaccttgccatagagaaggagcccccacagcgacaatgttctttggggagaagtggtgcagacttaatttataaggaaacttttctatgtaaagtttgagtacattaaggaagaagctcatgtcatttatatcttggagaatacttccttccagttttcattctgaattacattctacctacctcctccccaagagagaaggctgagcgcagcacatgggtctgtgtttcctccagctggccccagagagcgaatgcccacatgcaatcactgagcggagaaagatatttttgttggtttaagcagagggtagaaatctaataatttgctcacatttagttgataataaaaaaagcaactgtgaaagattattttagaatctagagttcatatacatatgtatgatgaaaggaaatagcattcttcaaagaagacattttccaattcagaccatgtttctcagatgcacttattgaaaattaaaaattagcatttcggtgtctcaaacttttcctgagataggaaaaccactcaagcttggttataaaactggagtcacagaggctggctggatcctggtgacgttttttttttaaatccagaacaaagaatccaattattttattacatttttaacttaggttctcttccaagagggagtggaggctagagccacacaatttatgagtcagggtcaggctgaagaaaggaatgcatctctctcctttaaaatatttctgaactcttctctcttgccaagaggaaaagcaacactgactgcagagatcctgggtgaagaatctgcagggctccctgctacctccgacccagaaaagaccccaagccaaatagtgtctcaatctaagcaggagcttagaattgtagaggacacctgagttgctatcttagacagtttgggatgccagaacaaaatgccataagctggggggcttaaacagcatttgtttcttatgcttatggaggcagaaagtctgtaactaaggagctgacttggtggaattcttggtgagggctcactttctggtttgcaaacagctgccttcttgctgtgtcctctatggcaaagagatagcacactctgatatcttcatcttttataaggacataatctcatcctaggagcaccaccttcatgacctcatctaaacaaaattacctcccaaagaccccacctcaaaatatcacactggggattaggaatcaacatatagatttgggggcaacacaggcagttcaaagcagctgcatattttcaaagatctttaaaggtctagtaaatccaaatcttttatcaatatgcactgtgattattacttttagtcatcacctggattaaggaatgcctagatagctagccaagcattatttccaggtgtatctgtgaggatgctttcacaggatattggcatatgagtttctggactaggttggagagatccaccctcaatgtggggttggggaggcaccatccaatcagctggcccaaatagaacataaaggcagaggaaagttgaatttgctcgctccctctcttaccccctctctcttcctcctggagctgggacctcctccttctcctgcccttggacaccagaactccagattctatgacctttgcactccaagactgtcaccagtggccccctgaattttcagactgtccttttttgactgagttataccaccagcttctatgattttgaggcttttaaatctggactgagccaccttatcactttccctcgttatccagcttacagacagcctatggtgggacttagcctctaatcaagtgagcaaatttccctaacaaatcccctctcatctctatctatctatctggcatctcctattggttctgtctctctggagaacttcaactttgtgagatagctgtcctgtttacttcatgctacaaagtatcaactatatttatcctttaaaaaaaattattttcttggataatatagtaagcatttgttttaaaattatttaaaaaataaactcataaagaagaaactgaaagtcatttgaaagtccttggtccagaaataaccattattttcatttgatgaacaaatatgtttctaatcctctctctatacatctgcatgttcatatatgtctacaggtaaaattttatttaaaaggtatgcattaaacagaactttcttttatattgatttttcaactcaaaaccttttcttattaccaaatatagatagccatcatcatgggtgtcatagtaacccatagcatatctgtaaagtaatttgtgagaatgcccacccctccattggtagatatttctgttgtttcctgctgtaatggacagcctgcacaagtggctctgtgtcttgcctaatgctcttctgagaaaaagtgtctggaattggaaaaggagatgagcacatttcatgcatcatcctgcagagaagttacagtctttcactctcaccgaccccatcaggggtacctatttcaacacaccaacaccagttgcagattttattaatctttctgacctttaccaatcttactgctcaaactccttcctgctttgatttacatatatttgatgcaaatttgaaccaattttttattggctagccagacaattttttttagaaaaagcacacaaattattatgatgaggaaggtactttgtaggcattagatagttaatgttagttaacagctgaagaatcttgaaaaataagctctactaaaacaaatcctaaactttttcaagatgctaaataattctgagtcagaaatagtattacttagaatccctacacgcacacacacacacacttttcttattcagtgatcagagctcttggtccattcttcaatcgccactattctgcctgcaaaagacagagaatgggaagtgttggtgcccctgtttgtagagattggaattatagtgttggccatatctgggttagaaacctgactccaccccatacccactgacatcaagtttgttttctttccttttttcctaaaaatgttacctatattcttaaaagtaggtattttgggctaagtaaatatcatcattttcattttgcacatagaagtggaaaaaaattatattacttgcccaaaggaaaaaaaatatgtgtacatttatgtagcatctgcatactcatcatatccatttcccaatgtgattcctttcctggataagaatagagagggctggtgttcccatgtcttgaataaagacatggcagcccaagcaatgcatgactggccaggatctgacatctaaatggtagattagggctgcagcagagtcatcgtgactcctagtccggcattctccccaccctctatgctataaggaaaacaaaatgtaatgaaatagcccttttaacaactgcaacttggagccaaggccaccaatggcacaatcactaaaaaccccacagacaacgcccagtcaaaccacagtctgggaacagaccccagacagccccttgtgggcccaggccctctctgagttcttcatcccatgaaagggttctgtgaaatctgaccatttgtcattctcaaagaaccaaaattaaagactgttctcatgccacgagttgattgttaccatgggtagggatgaaactatatttctctttctcccactgtatttcttgaccatatagttgtgcaacaaatataaattaaatattagttaaatacattgtctccccatggtcttgagactatgagtcagccttccttctcaacaaagacacagttgatgccagaaattagcaaggcaataatctgtctaacagtaaatatttgcctaaaggccatgttctaaatatatgacccagtggaatatatgagaggcacctcctttcttaaggagctcataacccaagcactaagaagaataaccacatgaaaaggccaccaccacccacagtgtgaacatctgagaccctggcgtcagagacagcctttgactcaggaagaaaaagctctgtgctgagtgtccattctcagctggattctgccttggtaatgctacaaacatcctcagataacaattcccactgtctccttgtaagtattatcatctcccccgaggagatagaaaactaaggttctgcgataaaagaaacttgaactgggatctggacaatagttaagtttaatttcacatcagagagggtgaggaggcagagatgtgacctcaggatgatggcttctagtcctgggtagatttgctctcatgtctgaaactggagtactggataagcctcgcggcatggtcttgcatctgggaagtagagctttcttcaattcttgcaaccgaggaggcacctagcaatggtagaagtgcttagagagagtatttccccaaccacacccccttgagggctttaagctacatctcccaggactctacgtggccccacacaggggttctctgtcaagagaaatggaagtcgaggagaagctagaacctcagtgttctcttttgtcgtgcaggaatgaggtccctgtaccatctcagctgaagcacaagtgtgagttcatcccatcacctttctgtccctattcaatggattaaatttagcaattatgacataaggctgaaaaagacaactcaaaactccaagaatcatccaatgttgagtgacgtaagggtgggaggaagagaagttaaaaataacagatgcatgaaaacactcagcttaataaaataaatatatccaagtccatgaggacaaagtgattgaaatacttagcgttcaggattgtccaaaagacctttctgtgctaatatgcaactctttcacatctacactacccaatacagtagcccccagccgtgtgtagctacagagaaactgactagtgccattgaaaaactcagtttttcatttggaaatgtgcacagaatggacaaaattctagacaaagtataacttcacaaaatcaattcatgaagaatttttttaaaaaaacttgatttctgattgtattgtattgaattgtattgaattattttttaaaatgtattgtattgtattgaattataagttttaaaaatatcaatagccacatgtggctagtatctacagtactggacagcacgataatctagaactcttctcccataaagaaaagcacaccgatcaggtaattaagggagcagactgggaagccaggcttaaacaaagtctggaggggatggtggggaaagtaatgaagtgctgtgaggacaacggctggtggatgagatgggagctcatgtaacctgccaaggcaaagaggaagaagatgggaggcagtcctcattaaaaaatatagagggcagggccccaaagatctttccaccagttcacttcactttaaagattaagaaatcaatctccacatagtaatgatttgcctggtcatattagcctggcagaggttgagctgtgtctgcaaggttaacctcctgattctgaattcaaatggttcacaattgttcttcaccaccttggggagagtaaagataatttaaattgttagtcaaagaaactgtgctagacaaagaggagcatttctgactgcagaggccctaggaccactggaaccagattccccagagagctgaggctgctcattgtccgacctactgcctggcattacagtcagaacgcagggtgggcacaaggcagaagctcctaagggaaatgacaactccatgtggacccctttggctctttgcaaaaattagatgaggcaaacctaccacaatagctggtcagatttagaaactctagaacagtggctcttggctagggtgatttttctccacccaaccccaaggacattcagcaatgtctggagacactttttggatgtcactaggtggggaaggggagctatgggcctcttgcagatagagaacagggacactgctaaacatcccccaacacacaggacagccccctatcacaaagaattaccctgcccaaaatgtcaatagtacccagattgagaaaccttggtctagagtaatatgggtgaatagcatttaaattcccatcatagcattctctgtcatgtggaatacagcaagaattcttacactgccaaggacatgagtggcttcaaagatccttcacatttttttaccatctcctgtaccccctcctagcatctaaaggggtctagaaaggcctgatacagaggattctatattgttattgattagagcaagtcatgacatcatcgggagacagaggcacacacatgagacacgtttgaatctcagtccagagttcaggcatgccacacatcatactgcattcccttctttacactgacccagtatggaggcagagacaagtatagaccacaccgtcaagagggttgactaaaactgcctttaccaaaagagaggcaagaaaatggaagtgtacctgtagaaggatctgggtttaagaatgtgtgaaaggattataatatttaaaagttaaaatcatgactcagataaacataaaattaatatttgtccaagattttattcaatttattaattaatgaagaaacagaggtaatggtaaaatgttacctctgtttccaaggagaattcaaactaccacacttcaataactgaattaggaatgctgaaataaattttataaatagatgccgaacttgctttttccacagagtcagaagaaaaattaattgtctttacacaaaacagaatttgtgtattcatgggtaagtatcattttattgctatcaatcaggtatctacaactcacatagttataaaatagctcaaagacaatgaaaggtacagagcactccccgctccaccccgagaagcagataaaagggaaactatgtctaaacaatacctgttttccacagaagccatccactaagcttttggtgcatttcaaagtccttcacaattttccccacagaagttcatgtggctcccatttttgggggatattgtgacatgtttctatgcagattggaatgatagggaaaattcgggaattcaagaaagagaaaggagaattggaagaacaaactcctaaatgcaagagaaggacatgtggctgagtaagcaagctgcagggctggccttcagtgggagcatggaaccctcagggacacactaggaggaaagtgagagcacgcatgccagaaagaggcagtcagtagatgccatggtggtggggtgatggggcaactcccttctgatacacctgctcctcaaggcagtcagaagtgaggacatggatggagagtgaagtgggtgcagagggtgatggacatttagcaatggcaacagatgtcatatggccattcccatgataccaaggatgagcagaatagagagatccagtggtgcagatgggcatgggtaagggccagcggggactccatgaatgactttacaacatgaccagaaccactggcaaaggggtagatgcatagatcaatggaacagaatagagaacccagaacaagacccacaaatatgcccaaatgatttttttttacaaggtacaaaagcaattcaatggaggaaagacagccctttcaacaaacagtgctaaagctactggacacccacaggcaaacaaacaaacaaacaaacaaacaaacaaagaatatcaacctaagactcacacctttgaacataaataaactcaaaatggagcatggatttaaatgtaaaaggtaaaactataacccatttagaaaaaaaaaaaaaaacagaagaatatttgtaggatctgggaccaggcaaagagttcttagaattgacatcaaaagttggaacatttgataaatagaacttcatcaaaatttaaaacttttgctctgtgaaagaccctgtcaagagaacaacaacaaaaaaagctacagacagggagaatgtatttgaaaacgacatatctaacaaaggactactatctagaatatacgtagaactcaacagtaaaaaaccaacctaatcaggaaacaagcaaaacacataaacacacatttctctaaatggattaaacagatggaaaatagaaatagtatgattcaatttaaacaatattcttgtaatgacaaatttaaaaaaatggagaacagataagtggtttcttggccttaaggaagtgaaagggatggaagagaaatgtggctgtaaaaaggcagcaggcaggtcccatggtgacggaaatgtccttgactgtatccacgtccatatcctgcttgtggtatcattcttagttctgcaagataatacctttagggaaactgggtaaaagatatacagaatttctctgtatcatttcttacaactgcaaatggctctacaattatctcaaaattttttaaagaaagctcaattaaaacaaatgtgaacagtcagcatggatgtgggctctgtcctggctatagtcctcaggtgtgcatgtgggttagggaaagaatcaggtttatcacctgaatttgtcaggtgacaacagtgaagggagctgaggctatatgccaggagaagagaggaaaagagactggagctgggactgaatgaggagggaagagaggaagggaggggagagatgggaaggggagaggaagggaagggaggggaggggatgaagtaaggagataatgggtcagttgctggtgtcccattgtttgcagtaagggtgacaaaatgagtgagctagaatgagagaagatggaattttgagaatggaatgctcaaaattgagatcttggagatggaatgaccatggaaggggattgctgaagaggagtggataaagagagttagacatgaggaagtcaaggtgctgagaagccagggcaatggacggatgatctccttggattttttaatgtgttcaagagcgaagacaaaagaagagtcagatattaacataccccttaagtgagggaaggcggtataatctcgttgtatgtgcttcaaatgagcagaggttttgcaggacaagggaagagaagtggtctggtctggaagtagcagttaggaacagatacctacctccttgcagtcctcgtgtgtgacaaggagaaaaaaagaccacaaggaaaaggtcaggagaggctcagggaacagccaggttttaacttagagctgtggctttcaaagtgtggctgccaggccggcatcatcagcatcacctggggacttactggaaatgcaaattctcaggcccacctcaatcccacataatcagaagctctacaggtggggccctggaatttgtgttttagcaagatatggcactatagctgggtttggaagaggggactggataccaaatgccaatggctcagcgaggaaatgcatggtttgacctgacctaagacaaagaaagaggtggaagcgacagcaaaccacagtgcacgcgtcctttctaactggggcttggaggactgcagtatcgtaactgaactttttttttttttttcaagaaaagctgatgctctctctctatatatatatatatgtatgtaaattctcctgacttttaaaggttggtggccaagcacattggctcacacctgtaatcctagtactttgggaggccgagtcactcggatcacatgaggtcaagagattgagatcagcctgtccaacacagtgaaaccccgtctctactaaaacgcaaaaattagccaggcgtggtggggggagcctgtaatcccagctactcggcaggctgaggcaggagaatcacttgaactcgggaggcggaggttgcagtgagccaagatcacaccaccgcactccagcctgggcaacaaagagagactccatctcaaaaaataaaaattaaaaaaaagtttttttttttaaatatagaaaacattgcacaggccattaaaaagcaccccaacagactgccagcatgtgtctgatgtgtagagaagcagggggattgggtgaggatggacgtttcaggggtgggaagcccaaggtctggtgctggccatcagggcctctgtgagaagctgtgcacagcctcactggtaagagggaagggtgaggggagggaattcccttttgtggctgaacaatgaggtggacaagatgaacatacctctccgggagcatctgcatgccagaatgaggagatgaacttggctttctgggcagtaaggactcctagaaatgctccaggaaggccaaagcctacctttgttactagggaaacccatgcctcaaacgcccagccagtgtcctccatgggcagaatggcaaagtggctcagaggatgggctctgagctagactccctggatttgaatcctggctctgtgcttactacctgtgcaaccttgggtaggttgcttgacttctctgcgcctgttggctcatgtctctgttggtaataggaatacttaagccacaggccttttgtgagggctaaatgggttaatacacgtaaagtttgccagtgcatgacacatagtaaatactcaataagtatctgctattattagaaattactagccttttatcagttggaggcttcctggaaatttgaccttgcgacttgtcgtagaaatttttcctggtgcatccaaaccataaacaaacaggattttttttttaatcctctatggataggacttactaaagaactaataaagaggggagtggaggggtaaacagaggcattcattactaaccaaattctccaagtttcctgggaagcagcagagtcaagaatctgccccagagcttcagagagtttctcactctgctttgaaaagtgagggaccctattgtattagttggggtcaccctaaaaggagattgagtcgaggtcttggttgcaggaagtctagttgagaggttgctcagctgcggggagtttagttaggagaggaccccctaccttcaggtagcactgggagcagctgggaaaaggggggcacagaaatgggaggcaggttattgctatgggtggctgggctgggaattggggaatttatcactgactcccattccacatcgactgagggtggctcctagcagcacttgctcaccccccttccaggctgcccctttgccccggtgctggaaaatgtccctgcagaggctgagagggagacaggacttggggtgggccgatgttggcatgcacgggagctgccccatccagcctcaggtgaatgcaaatgtgggatggagaatgaagagcacctggaccccacatgtctccaaacagactcatcctcatgcagattgtttcaggtgggcctccctctgttgggaggaacaggccaactggagcagctctgctgatgggcatattgcaggacacagactttgaaagagcatggcagggaatgcagtgcagcagggcctcgggaaggcaatgaggatcggaacactgagtgatgccaaggaagactctgtgcctctcaggcaacacatctgctccttcatgcagctctgtcccctctcccactcttcacccttcctctccaaatgagctttctctcttcgccagttcagggtctcacccacggtctcacccacaaccatgaagctcagctaactcaggccagctcttggtgttgtgatggtgaaaccccaggaggtgaaatttattaggccatcttggatgaatcagctctgtggggtggaggatgcttgagttggctgctccagaagcagcgcctgagaggagacctgtggactatgggtgccccataagggagcagggtaagcagagcaggacagggacacaggagtgacagagactgcaagggtgaatttcaagcaaaggctgcagcaggcagcttcaccccatcctgcagggaattcgggagggcaggtgactcctcagagatgtcccaacctgagactttcacacccctgcgctagcactgttggaggccatcctggaggaaaaatagactccctggcaaccctactgggtgtgggcaggcaagtggctgcagttgctgtagggctggcctctgaagaaccatgggcgaatgctgtcaaaagtacaccgaagctttccacaggggcacagaaatggtaaagggagctcaagggatctgggtagcacccacattatctactgagggccatggagtcaggggttatggagcaagttggaaaccagtgcacagcttgggccactatgtctgccccttctgtgggacccaggttgatgatgggtctaacagacaggtgctgtgagaagtcagactctcaaatcagacagtgattcagggcacagctggcaatgcaggaatcaagcatgtcacaccgcttggtggccatctgccaggcatcgataacttgataaagctgggtttgaagactgcttgttgattcgcagacttcgcataaaaatgtcaacaccaccatcttctgtttcgtgactttaaactccttttgggtttaaggatgtggtgccttcaaaagtcacctacagaaaccactgaagtcccaagggttgttataggttagctttgttgatttagaagggggggttagcttgggctgttggggtcaggagtgagcatccgaggacacacaggggccctattggaaaaaggtatcagcagagcatatgaccccagattttttctgctgcagagctgaattcactgcaattgtcaggggtttgctgagatgtcagaaatgaggacattttctcaagctctttctgaggtgtgaccacacttcaggaaaccttaaatatatactgagaaaaatacttgtttttcctccaatttgtgatttccacaagccttaacaactcctcacaggtcccacaggagggggtgaaattaagggtaagagattccgcccagagcccgcatgatgctgtgctcccttccctctgtgcctcctttccaggcattttccgactgagtctcggctgctggctcacatctgaggggccctgtgtgctttggtgaagctctaaccagactcacatcctcccaccacagccatcatggggagctgtactggccacatctcctgggcagcagagtcagccacctaactgcacccctctcttccccttggagggctcagagataacctcccccaaccccagcccaaaaaggggatttgaggtgagcagaacacagttcacacactacaatgctcattctttctgcatcttaactcaatgggacatcccattttcaagttgggttaacaggaatggactgaacattatctgtttcctcaaatataaagctgtctcttgggtaaactctatctcctttaggttaaaccagtggttctcaaacttagagcattatagttgtctctaaggcttcttaagacacatggcagagccagccccaagaatttcagggctgggcccttagaatatgccgccataaaatgctgatgctttgagatcagctgggttaaatgggaagttcagtctaaactcttaagcagagctttttctcccttctctcaaaaggttctgcccttttaatatggtttggctgtgtccccattcaaatctcaacttcaattgttgtctcccagaatttccaggtgttgtgggagggacccaagcagaggtagctgaatcatgggggctggtctttcccacgttattctcctgatagtgaataagtctcatgagatctgatgggtttatcaggggtttctacttttgcttcttcctcatttttctcttgctgctgccacgtaagaagtgccgttcacctcctgccatgattctgaggcctccccagccatgtggaactataagtccaattaaacctctttttcttcccagtctcaggtatgtctttatcagcactgtgaaaatggactaatacagtaaactggtaccaccagagtgggacgttgctaaaaagatacccaaaaatgtggaagcgactttggaactgggtaacaggcagaagttggaacagtttggaggactcagaagaagacaggaaaatgtggaaaagcttggaacctcctagagacttttaactctaacttgtagaatgggagaaaaaatctcaaagcaaggtgaaggtgatttccaggaagctgcctgggattctctggatgctttctttgctttccttgtaaggacacattttgggacacttttctgcccttgccacatgcagaatcgtctgctgtaggtcttggccctcctaacttcctgatctggtctctctctcttaatttccctgcagacatttctcaggacctgctttcagaggcccatttgcctgcagtgcctgaacctcccaatccccatgcctttgcctcccatgacatgcaaggcagcccattgcctcagtctgaaggtcagttgccttcagcatttcttcagcagcgggactttttcaagtctgttttaggtcattgcttccttgcacttcagcctgtcagggattccatcactgttgtccttctgtcttttaatgccacctagctgacctggcaggagctcattcttctccttaaaccactccaggtgtctgcacgccatttcacacaacaattgcttcattctgaagacttcagggatatggatttctctctttgaggtctgacagtggggttacaatgaaaccttagacactttcatctctcttgttcctgtgtttccaggagttttgccacatgtgttttccagaaggtggtatcaggactcctgggatacttaccagggagatcataacatgtttgccttgcttcaccatgaagttattcttctcctgatccacggcctctgttatggcctgaaaacttgtgtcctcccaaaattcagatggtgaaaacctaccctctaatatgatggtattaggaggtggggtcttatggaggtgattaggactagatgaggtcagggggctagatccctcatgaacaggattagtgtcctgatgaaaatctcaagctgtttctctctaccatgtgaggacatagctagaacagctgtctgtgaaccagaaagcagccctcgccacatcacacactgaatctgcctgtgccttggtcttggacttcccagcctccagaattgtgttcagaactgtgagagatttatgtttgtaagccacttggtttatagaatcctgttacagaagcctgcatagactgagacatctgtcttctagtatagcatgtgctgcagttcctggagctgtactgggtgcctcccttttccctggcaggctggcagagtccaagtgtcttccagagcctccgggaagcatgttcagatactcatggcatgagccaggtcttcacagagctctgtgtcctcagagttctctcaaaggttcctttcacttctagaatctcaacattctatctgctggagctcgatcgtgctgtcagccagagctcaggtgcatgtttgagactcacatcctccaggtcttgcttcagtgtccatttctatttactcatggactgatgatcttgattggctccatgaggtcagctacaatcacactgttagcatttctagacttctccagagacctagtgactttttccatggaaaagagactttcttcttgtgtttgtacgcttgccatccactgttcacacttgtttcttcccatttctcttgctgtacatcctaaagaacacataagaattctttagaatgggcttctttatcttcacacagatttattattgcatttttttctgcctccaaagctcatcccatacatcaaatcatacagatcagacttcagagttttattctttgcagttttgaaggtttttgaaagtcggtctatgtcgaatgccattccttcttgtaaataagcacaaaactcccctgaagatcttccaccaaaaaacttttttaaagatggggtcccttctgtcacctaggctggagtgcattactgcaatcatagctcactgcagcctccaactcctgggctcaagtgatcctcctacctcagcctcctgaatatctgggactataggcatgcaccaccacacccaggtgacttctttaaatttctttcagagatggcatcttgctacgttgcccaggctggtctcaaactcccggccccaagtgatcctcccacctcggcctctcaaagtgctgaaattataagcatgagcccctacacccagcctcatttctgatttttctaatatttgacactatttagttgaagctgtatatgcacatgtcttatagaaaatgagttggcttctttctcccgactctgaatgaactacacccagctccttcaaagtcagcttgcctgcagagttaaactataaaggttgtatacctcttttcagtcgttctgagtttgagaacctctgagctgcatgccaactgtgagggatgctgttgctgctgtgtggtccggtcagttcttcctgataaggacaatgcctgcatctgtgtgaggacatgttccagtttatcaatctgttgctgatgctttggcatctatgatcctctttgttcaacctcacctgatgagacaggtgttgttgcccctttttgagcccctcaggaatggtctccatagagtgctcactcatctcaggaatgacttaacttgatctaatcatcttatcataagttgccgctctggaattctgagcacagaaccaaagctttatatttcaaggtgtggtcagggactgccaagactggtgggttgtcaatgggcttatagccttatagtcttatagcttatagtctttctgcacaaattttatttagcttagaagtttcttagtactcacaggctttttgagtttaaagttaccttttgcaaaaacttaaaccccaacttgaagtctagttatttcttcctaattctttgagttttttatgtgtttgctttgactcattcagctctgaatcagcaggtggtgtgcttttaacttctcagtgcttgtcagtaagcctagagtttttggagctttaaggaaaatccctcttgatgtttgtcttttgtctgtgctagatgtttcatgaaaagctttttctagttttgcaacaatctgggcacctattttttcagctaattttataagccttaggatgcaagtcctccatcctcctccctgagagaatcctgtttgtggaggattcattcataaactccatcttagacgctgagccaccaggttggcttctgattaacccctattccaggaagcctctgagatttccagtttatttattgtttcttgtataagaacaggtccttaccataaatcttgctcttgggtcaaacaacccgtatgctattgtacttcaattgtcctacacatcccttctgaaccacatttttcctgtgttggggtggctgaggaaaaaaaaaaaaaaagcatgaattaggccctaaaaactgcatgctttcttagccctgttccctaacagcctccaccctaaatccagtaatctaatgaagaaacaaactagtatcaaactaaatcagtctttataactctttttaaaataaatgtacgtctttaaaggaactcttcatttgtaaaggaatctccatctctgcacttaaaccacgatctaaagacctggaatcaatagaagggaatgtctggattaagataaagggttgtggagaccaaggttaatcatgcagatgaagcctccaggtggcaggtttcgagctcttatcagacaaaaaagatgccagactcttagttaattctctcctggaccagggaagagacctggaaaggaatggagattctctacagaatgtagattttccccacaagagatagctttgcagggccatttcaaaacatgtcaaatatgatttgggatttaaaaaaaacttcaatttctttcagggctggctatctgtcatgtgatagtagagtcaggctggaatttggtgtcttactgcgacaaagagtctgctttgtcagtcttaagatctgttttatttgggagactgaagcaagaggatcgcttgagcccaggagtttgagaccagcctgagcaacagagtgagaccccatctctattaagataaaaaaaatctgtagtaatgtaaatgctggtcagctgtgcctgaattccaaaaggaggagggtataatgaggcagtccaaccccctacttcccattatggcctgaaatagtttttcaaattaactttggaatgtccttggcccaggtgaagggtccatcagttggttagaggtccttgaattttatttttcacttacatatatgattaatatgattaacatatataacatattaaagttaatgtttcagataaacatgtttatagaacatgaagatacaatttccaattaaagaaaaagtcattttgtttagaggctatttaaaagttgtttcaaaacaaaggaaaaaagtgatgaaactaaatggatggaaaggaaggataaaatggtgggaaatgagaaacctttgattcttgggtgaccatgtggtcaccatggtatggagctatagctgaattccattcagttactaagggtataagttaccagtggaacttagagatggatcaaactcccagggaattgactcactagattcataaggagatgcaaactaatagtaaaatataaaatactcaatctcctggttattatctataatagctaaaatgaaaataaaaagaatgtgctgcgttgggccttgaggatggacccagctcagatgtaggcctgtgtgagctcaggtcactaacttcaaagctcaccatatagaaaattatgccagaaacaaaacagcctctgagatctacggttactgagaaggtagtctatgtgggggttgggcaaaaacaagtaactattgaaaccagagggtatagtgtgaaggagtgttccattttacagattggtttcatcaacttgctgaggaacctttactaaaatggattgtgaaagtctttgatttttaagtgctgcagagtagaagagcatgtttgggttgatacaggacccacggctcactattgaacaaacacagctgggtgtatatatatgatccagatacacaggtattcccaagagaacagccagcatggtagaccagataaaagccactggataaaattgtctgcctaccttgagaaggggaactgtccagttcattctataaatgcctagtggagcacaacagatgaagaagctgatatgcttcacatgcaaggactggctttatgataagctgaatattcacccactgaatatgtctattacctaggtcatggtaaatgctctagttaaagggggccccttctgcatgaatggctcattattgcccttgtactgctgctaaagctatacaatatcaggtaccctccctaaaggttcagggaccactgtggaagaagaggacacatgataatgtaagagcaaataggaggtagagtgtggaggccaaagaactgcattttggatgctgatctgttgtgttggcttttgattaacccttgttccaggaagccgctaggatttctaacttacctatcattctttgtttaagagcaattatttattataaatcctgcccttggatcaaacaaccttaacattattatacttcagatgtcctacacaacccttctgaaccattcattccttatggtatgtaagccttgggtctgggagtgatggcgtgaggaatccaccatcttgtctcacggcaatgagacacagagacagacacacctgagacacagacatggcttctgttcatcagtccctttttttttttttttttttttgagaaattggattcgtgatcctcttcttcggcttctcagattcctcagatttttgggctggtttgtagaacactcttaaattcaccaggttagctaggaagatgtatatcttaataatttcattgctctccaccattgcctctgttgtcattgtaaagatagcagaaaacatagaggattctttattcattctttcaatgcctcgtgttcatctcaccactgccaggtgggcttccagaccacggttaacactggccaaaccgcatgcaccacacagttttccttctaacacagaccagacaaggcagaatcccacaggtaggtttataaaaaggaaccttgataagaaaaccctagctccagctttctctttccattgtaacgtaagaaatactcaaaactttgtgaaattgctcctcatgtcatgagaaaacggagatgcatcatcataatgtgctacttgcaccagtctgtccagatgcaaggatgatgttgttacttatgcaagatgccacagagctcctgggcacaggtaaacacaggtatcagagtagtgaccagaagggcctcaaggaaagcacagatgaggctatacattacagactacagatcagctatagattttgtgtcttcttcacaaagctcagacagttcctctctcttcctagtgtgctgggagtttgtatcaccagtgagtgttgaatgttatcaaatgctttcctgggtccatttttctcagcctgttgatatggtggattacattaactgattctttttctttttatttaaagatggactctcaggattcaggggatcatggcagacggaaggcaggactagattgcagctctggacagagcagcatgcagaagcttgcattgcgaattttaacttcaggttgactgcaagaacaaaccagcaatcccaggaggacccacagaccctctgaaggaagcagacttctcctgtaggacctgagagacaccccaaatactgtgagtgccccaacagcagaagtgggaaagggacacctcctctcctgaacacacacccccagtggagaagctgaaggtctttttgcaggagaagtttccaatgttacctggatctgagtcacgttagagaggcaagcaaactagagaggtatagtaaggagcagaaaggccctgggagctcactgggtccccaagcagcatattcctgcctggcaccacagggatccattgggagggtggccagaggagcagggggtaaaactccacaaggagaaggaattttctagccgaactttgtaacaatttgaatggtgtgagaagcctcctggctagaactcaggggagggcaagatcgggcatgcagacttcacaggccagggaagaactaaagcccttttctctagcagatgggaggcagatagcctcaggaaagttttcaagcctatcttgccctctgcctggaaacagacttggggctgttgggcagtgcacagtgggagtcagatcagcccttcagtttgtatgggagctaggtaaggcttgtgacttcgggctttcccccacttccctgccaacctgcaagacttgacagaggcagccataatcctcctaggtacacaactccagtgacctgggaatctcacccgaattcccaacagcagctgcagcaagacttgcctaaggagaatctgagctcagacatccctagccctgcccctgcctgatggtccttccctatccaccctggtagtggaagacaaagggcatataatcttgggagttctagggcctcacacaccaccagtccctcttcaccctactacagctgatgctttctggaaagcaccacctcctgacaggaggccaaccagaacaaaaatagagcattaaaccaccaaagctaaggaccctcacagagtccattgcaccctccaccacctccaccagaacaggcactggtatcctcggctgagagactcatagacagttcatatcacaggactctgtgcagacaagcccctgtactagcccggagctgggtagactctctgggtggccagacccagaagatagataacaatcactgcagttcagctcacaggaagccacatccataggaaaagggggagagtactatatcaagggaacaactgtgggacaaaagaatctgaacaacagcctttagccctagaccttccctctgacagagcctacccaaatgagaaggaaccagaaaaccaacccgggtaatatgacaaaacaaggctcttgaacaccaccaaaaaaatcacactagttcaccagcaatggatccaaaccaggaagaaatccctgatttacccgaaacagatttcaggaggttagttattaagctaatcagggaggcaccagagaaaggtgaagcccaatgcaaggaaaaaaaaaaagaaagaaaaagaaaagaaacaagaagtgaaaggagaaatactcatggaaatagatagcttaaaaaaaagacaatcaaaaattaaggaaacattggacacacttttagaaatggtctggaaagcctcagggatagaattgaataagtagaagaaagaaattcagaactcgaacacaagatcttcaaattaacccaatccaacaaagacaatgaaaaaagaataagaatatatgagcaaagcctccaagaagtctgggattatgttaaacaaccaaacctaagaaaaatcggtgtaccagaggaagaagagaattctaaaagtctggaaaacatatttgggggaataatcaaggaaaacttccctggccttgcaagagacctagacatccaaatacaagaagcagaaaaaacacctgggaaattcatcacaaaaagattattgcctaggcacattgtcatcaagttatccaaagttaagatggaggaaagaatcttaagagctgtgagacagaagcaccaggtaacctataaagggaaacctatcagattcacagcagatttctcagcagaaaccctacaagctagaagggattggggacctctcttcagcctcctcaaacaaaagaattatcagccaagaagtttgtatccagcaaaactaaccatcatatatgaaggaaagacatagtcactttaagacaaacaaatgctgacagaattcaccattaccaaaccaccactacaagacctgctaaaaggagctctacatcatgaaacaaatcctggaaacacatcaaaacagaacctctttaaagcataaatcacataggacctataaaacaaaaatacaagttaaaaagcaaaatcaaaaaaacaaaagtacacaggcaacaaaaagcatgatgaaagcaatggtaacacacgtttcaatactaacaatgaatgtaaatggcctaaatgctccacttaaaagacacagaactgcagaatggataataactcaccaaccaattatctgctccctcaggagacacacttaacacataaggactcacataaacttaaagtaaaggggtggaaaaaggcatttcatgcaaatgcacaccaaaagcaagcaggagtagctattcttatatcagacaaaacaaactttaaagcaacaatggtaaaaagaggcaaagagagacagtatataatggtaaaaagccttgtacaacaggaaaatactacaatctcaaatacatatgcacctaacactggagcttccaaatttatgaaacaattagtaatagacctaagaaataagacagacagcaacacaataacagtgggggacttcaatactacactgacagcagtagacaggacatcaagacagaaagtcagcaaagaaacaatggatttatactacatctaggaacaaatggacttaacagctacatacagaacattccatccaacaactgcattctgttcaacagcatatggagatttctccaagatagaccatatgataggccataaaacaagcctcaataaatttaagaaaattgaaattatatcaagcgctcctcagaccacagtggaataaaactggaaatcaactgcaagaggaaccctcaaaaccatgcaaatacatggaaattaaataacctgttcctgaatgagcactgacccaaaaaataagtcaagatggaaattaaaaaattcttcaaactaaatgacaaaaatgacacaacctatcaaaacctctgtgatacagcaaaagtggtgctaagaggaaagtttatagccctaaacacctgcatcaaaaagtctgaaagaacacaaacaatctaaggtaacaccttaaggaactagagaaacaagaatgaaacaaatttaaacccagcagaataaaggaaattaccaagatcagagcagaactaaatgaaatggaaacaaacaaaaggaaatacaaaagataaatgaaacaaaaagctggttctttgaaaaggtaaataaaattgatagaccgttagcaagattaaccaagtacagaagagagaaaatccaaataacctcactaagaaatgaaataggagatattacaactgacaccactgaaatacaaaagatcattcaagaccactattaacaactttgtgtacataaactagaaaacctacaagagatggataaatccctggaaaaaatacaaccctcttagcttaaatcaggaagaattagataccctgaactgaccaataacaagcagcaagattgaaatggtaatttaaaaattaccaacacaaaaaagtccaggaccgactcacagcagaattctaccagacattcaaagaagaatgggtacaaatcattctgacactacacaagatagagaaagaaggaaccctccctaattcatttgatgaaaccaccatcaccctaataccaaaaccaggaaaaaatataaccaaaaaagaaaactacagactgatatctctgatgaatatagatgctaaaatccttaacaaaatactagttaactgaatccaacaacatatcaaaatgataatccatcatcatcaagtgggtttcataccagagatgcaggatggtttcacataaacgactcaataaatgtgatagaccacataaacagaattaaaagaaaaaattacatgatcatctcaatagatgcagaaaagtcattcaacaaaatccagcctccctttatgattaaactctcagcaaaatcaacatacaagggacatacttcaatataataaaagccatctatggcaaacccacagccaacataatactgagtggggaaaagttgaaagtattccctctgagaactaaaaccagagaaggatacccactctcaccactcctcttcaacatagtactggagtcttagtcagagcaatcagacaaaagaaagaaataaagggcatccaaatcagtaaagaggaagtcaaactgtcactgtttgctgacgatatgatcatttgtcttgaaaaccataaagactcctccagaaagctcctagcactgataaaagaattcagcaatgtttccagatacaagattaatgtacacaaatcagtagctcttctattcaccaacagcgaccaagcagagaactgaatcaagaactcaaccccttttacaatagctgcaaaaaaaaataataaaatacttaggaacatacctagcaaaggagtcaaaagacctctacaaggaaaactacaaaacaatgctgaaagaaatcttaaatgacacaaacgaatggaaacacatcccatgctcatggatggttagaatcaatattatgaaaatgcatattgccaaaagcaatctacaaattcaacgtaatccccatcagaataccaccatcactcttcacagaattagaaaaaaataattctaaatttcatatggaaccaaaaaggagcctgcacagtcaaagcaagactaagtgaaaagaacaaatctagaggtaccacactacctgatttcaaaactatgctataaggccatagtcaccaaaacagcatggtactggtataaaaataggcacatagaccaatgaaacagaacagagaacctagaaataaacccaaatacttacagccaattgatcttcagcaaagcaaacaaaaacacaaagtggggaaaaggcactcttttccacaagtggtgctgggataattggctagccacatgtaggagaatgaaactggatccacatctctcaccttatacaaaactcaactcaagatggattaaagacttaaacctaagacctgaaactataaaaattctggaagacaacattggaaaatcccttctagacactggcttaggcaaggatttcatgaccaagaacccaaaagcaaatgcaataaaaacaaaggtaaatagctggaacctaattaaactaaagagcttttgcacagcaaaaggaacagtcagcagagtaaacagacaaccaagagagtgggaaaaaatcttcacaatctatacatctgataaagaactaatatccagaaactgtaacaaactcaaataaatcagtaagaaaaaaacaaacaatcccatcaaaaagtgagctaaggacatgatagaaaatctcaaaagaagatatacaaatggccaaaaaacatgaaaaaatgctcagcatcactaatgattgggaaatgcaaacccaaagcacaattacccccttactcctgcaagaatggctataataaaaacgtcaaaaaacagtagatattggcgtggatgcagtgaacagagaacccttctatactgctggtgggaatgtaaactagtacagccactatggaaaacagtgtggagattccgtaaagaactaaaagtagaactaccatttgatccagcaatcccactactgagtatctacccagaggaagagaagtcattatttcaaaaagatacttgcacactcatgtttatcacagcacaatttgcaactgcaaaatcatggaaccaacccaaatacccattaatcaatcagtggataaagaaactgtagtatatatataaaatgcaatactatgcagccataaaagggagtgaattaacagcatttgcagtgacctggatgagattggagactattattccaagtgacgtaactcagaaatggaaaaccaaacattgtatgttctcactgatatgtgggagctaaggtacgagtatgcagagacataagaaagatacaatggactttagggacttggggggtagtgtggaatgggggtgagggatgaaagactacaaatatggtgcagtgtatactgcttgggtgataggtgtaccaaaatctcacaaatcaccactaaaaaacttactcatgtaaccaaatacgacctgtacgccaataacttatggaaaaatttttttaaaaggtggagtctcactctgttgcccaggctggagggctatggcacaatcttggctcactgtagcctccatttcctgcatttaagtggttctcctgcctcagcctctgaagtagccaccatgcccagctaatttttgtatttttagtagagacggggttttgccatgttgatcaggctggccttggactcctaacctcaagtgaactggctgtatcagcctcccaaagtgctgagattacaggcgtgagccaccatacccagttgattttaaaacgttaaaaacaaccttacataactagagtaaataccacttgatcatgggatactattctttgtgcattgttgggttgcatttgttaatgttgtgagaatttttatatctgtagactaacatctctcaagaacttagtgtttttttgtgtttgtgctctctttctagctttgatctccaggtaatactggcttcctcaaatccattgagaagtgtgaccggcctgaaacagttcctataaacttgataaattaatgagggaagaagagaagggagaaacaaaatatgcccagcttgcagcccactcggcgttcatcatgaggtcagctgctctctgacgcttcttctgagctgcatagtgcctgttgtgctgtagtcgtgtagaccctgtagtttcccttaactgctctatagatagagtttcatgatgttcaagttacgttttccttttgggagactgcttcaggtcctgtatactgatgcagctactgactcagctggtcttaaggaccccatgaggagctgactcaaaagaacagtttctacatcctgatgatttcatcccccataccccatccaatcaacaaccctaattttccaacccctcaccctccacagtcctcttaaaaaccccagctcagaactcctcagggagatgcatttgagggtctcctcccatctcctcacttgatgcactatgatcattaaactttctctgcaaaccctgctgtctcagtgtaattggtctactgcacagcagtatatgaacctgttggtcctataacatgcttttttcttttttggaagtgatatatgaaactggtgttaccttgactttgaatgtttggtaaaaccctccagtgaaacggtcccttgtaattagcataacaatgaataaatgatatgctgtctcaaatcttcaagtaggagttataagaatatcctctaaaaagaatagaatctagtccaaattcttcaacctacaggtaattggaagaacagtgaacagccatttggaagcaggctgcagtggaggtagttgactcactgctgccccctcgttgtaagtcatccaaagggccacaaaagagggtcaattttggataagtccaaagaaaagccaataaaaagcttcaatataaagggcccagaagagggtagcaaaattttcaaagataattctgaaaaaaattccaggtcactggtgctggctcttcaggctggggaagggagtatctgggcatgcctgggagcccaggtgcctgagtcctcaggaacatgcctagggctctgttcctgcctggataaagagcttacaggaattctggggatgggcaggagggctaatccaggatcgtaggctgtgctgcctgttgatccatggcccagtcattattatggatccattccttggagctggaagaggcagtgtccctctgcctgggcttcataaaggtacaggcacaggaatgctggtccagagccccgtctgaccttagtcagagctgctcttctttacctgttttgttcaggactccaaatagttaacttggaaaatcaaagttggaccactcagaaaacaagttcttcatctctctagaatcacctgttccactcaccccatgagctgaaaggaacaaaatttgtgtcactcttttcttcttggaatttaccttttggtagttaataaactttgttatatggtattcactatatatttgtcatactaagtatcacatacatgtcaagccatgatgaaccaaacattcccaagggcagctaggggtggagcttgggacatcttgtgattgaatcctcctccatagctttgagcttccacgtgggcttttttaaaagctgtgggggagtggaggtgttaggtcttcccttgcttgcctgttggcttatccatctctcatttccttcaagcactgacactgtcccttcttcatcatttcttggcacctaacaaaggacccttgcatggaactttggaagagcagaggatgataggtaaaatggaaagagcttaaatctgagcaggcaccactgtttcccctgggcacaggccatccccacctcgcacatacatactcacctacgcttaccctaagcctttgtccaaatccctctcacaaagcatctagcttgcctctccttcctctgtctcaagtcaccaggaacttgaattcaggcttcctggggcagtaagaaaaccttctcaatttaatatgatcaacagctcccccatactcctgagcagccaggatgactcctttgcagagccaaagatccatttccctaacaaaatgtccttctcatcttggggagaattctgttaggaacagggatgggatctccaccttgaggtctgaggacagaaatttggttaagaagaaattacatctttatttccactagcctgtaactgaaatttggcatctccttctaccatgaatggaggcaacaagctagagttttattatcaggacttatgactttatttccagcagaaattgaagatattttcatctcatttcaaacatgtaaatatatcttcaaatagcatttatgttccccactacttggaaattatagaagttatcacacttgctgctaggacctgttaatagctaaaaccacatagacatgactatacttacatagtttagtgctttttctttaaatcacacgtatttgattttcagcacttatcagctttcttctgagaaaggtttcacaggctccagcagactgccaaagaggtccgtggcacaaaaaaacccatattccagacacatcttgtgactgactgcagtctatctgtagcacaacctgtctcctctttaagcacctcacaattcagtcagctgtcggttaccaattaaatgtatatcaaagctttagagtgcagaacctattcaaggactacaggaactgggaggagagtgagcaggtgggtggggagctacttgtaccaataccctatccatattggtttcgtctgggttttcccataggccagagtgcccaaacctgccctcacctgacatgctgacatgaggatggccttgtcacatgtactgccatctatgacagaatttggtcttggatattctgttccagaacccagaggtggtggtaggcagaggaacaaagtcgactgagcctctgggggaacaagaggaaacaaaggaaatatttaacaaattaagagacaatcggaagtcaatgagaggaggcaaactatcaatggtcagatgagcagggagtccccagcatgggtgagcccaccctcagtggggaagggaacttgcctgtggtgttagcttctatgatggaagtccatgaagaagaagttctacaaatggggaaattgagacaacacaagcaaactaagaaacttgggacacatagtagaaatctagacggttcttttaatggacagactattctttaaaggaggtcctaaaactgtagagatcacagtccccgctaggttcaccaccccacctggcaggaaatgttgtgagaaggggtttaagtgtaaagtaaacttgtaacaagagtggctggcgccagtctaagcaagaggtaccacaaggaatttgtgcacatccaggaatgtggagttccacaactctcaactagcttgtgggaaagcatagggctgcttttctgttgactaaagctatgaaagaactgaaaagtgtggcttgccaggaaaacacttgctgtccccaaggacactagcgctgaggacatgagaggaagcaacacccttggatctgccatcacttgtctaagaatggcaatcatccagtaacagatcagccttggctttcaggccaacaaatttcaggcacttgtaataagctgtgcaaccatcgccactattttcttacccaattccttttcagctccagcaggtcctgccagtcaccttgtacgacttaccccactggctttttacatttcagaattaagaaatatcatacagcaaacaaagggttgagttaaaaaagcttgtttgcacattgttttaggaattcagaacacatttcccatagaaacaatgcagacaagccacaaaggcagatggttcccttccttctgcccccacccaaaagtttagcctgtgatgttctgaaagcacagtattattccccattaaattgttcctgaaataatgccttttgagtcataattcagaatgcctaactgaattttatggtggctttaaatgtggccccaaagttctttgcactctatgtgctctccccttgatcctggctctgatgacttgaccaaaagaataaggcagaaaggatgctatgccagttaattttgtgattatagaattactatgataccaaaaccagatagtactaaaaaaccccaaagaccactatccctaaaaaatacggatgcaataatccatacaaaatattagtaaatagaattcagcaatacataactatataccatgatcaagtgagattttttttccccaggagttcaaggctgctttaatatgtaaaaatgaatataatccaccatgttaacggactaaataaaaatcacatggtcatatcaagggggaagggaagcatttgacaaaattcaacacccattatgatgaaactctcagaaaaataggaatagaagaaaactcttccaacttgatgagcatccacaaaaagtccaggctccctccacggtcttcctggtaacatgggagtgagggactttcacaggctggcagggatggaagtcttggctccctactcagtcttctctgacggtgacccattcattgtgggggctggactcctcattagcctggtagtctaggctccccatctggccttggtgagtggagatggggctgccgattttctgtggtgtttagatggagtaaagcagatgttgctaacaggctttcttttttaaatttgtataaacttaagagatataagtataattttgttacatcaatatattgtatagttgtgaagtctgggcttttagggcacccatcacccaaataatgtgtactctacccattaagtaatttttcatcacccacctgtctcctattccctaccctcccgagtctccaatgtccatcatttcacaatttgtcctagtttatacactatttagctcccacttataaatgaaaacgtggtgtttgattttctgtttctgcgttatttcacttaagataacggcctccagttccatccatgttacttcaaaagacatgacttcattttttttgactgagtagtattccattgtgtatatgtatcacattgtctttatccaatcatctgctgatgaacacttaaactgattccatattactgttattgcgaatagtgccgtgataacatatgagtgcaggtatcatttttatataatgatttcttttcctctgggtagatacacagtagtggcgttgccactccaaagggtaattctatttttagttctttgccatatctccacgctgttctccaaagaggttatacaatttacattctcactggcagtgtgcctgaaggttttatgtcttgccaagtcttagttctttggccagagagagcaggcttttggggggcctttcttgcctgtgcctgttggtatttctgggtggctcacttctttagctctgactctggaatatgaatcaaaaagagattcctgggacttaccgctaggtcatccgttgggtcctggggtccctggcccatctgcctctttctcttcacctttcagaggcttatgtttgctttgcacacaatgtcccaaattttagttacttttagcaggatggatagggatggatagatagatagtccatctattctatcttcctggaagcagacacctgatatttttggatatctggattctgcctctactttattatttgactggatgtggaattctaggctgtactttagaatttgaaggttttgctgcactaacttcttcccttccagcattgccttctgattttttttttaatgggatcttctctcctttctgctctctctgtgtcaccctcaaccttcaggacgttttttttttctctctagaaccccaaaatgtcatgaaggtgtccttggtatgtatgtttctcctgtcttttgggggggtactcttacggcttctttaacttggagacacatgcctcaggagtatagaattgttccactgcttatttgacaggttcctttcctttatgcttttcagccttcctggaactctgaagagccagttgctgcatcttctggaacagaagatgcctctaggtttcttttctctatttttctgcttcttttttgtctattttacttcccaaaagagtcctttaatcttctaatatttctctacaatattgatatggtcataatgtatatgtccctcaccccaaattcctgtgtcgaaattctcacttttaagattatgatattacaaggcaaagtctttggagggtgatttcatgaatgatattagggcccttaatttaaaaacccaagggagaggccaggcacagtggctcatgcctgtaatccaagcagtttgggaggctgaggtgggcggatcaagaagtcaggagatcgagaccatcctggttaacacggtgaaaccctgtctctactaaaaatacaaaaattggccaggcatggtggcatgcacttgtagtcccagctactcgggaggctgaggcaggagaatcatttgaactcaggaggcggaggttgcagtgagccgagattgcaccactgcactccagcctgggcaacagagggagactccgtctacaaaaaacaacaaacaaacaaacaaacaaaaaaaccaaggacacagcaagaagatgctgcctgtgaaccagacagagagtcctcaccaggcaccaaatctgctgatgccttgatcttggatttcccagcctccagagctgtgagaaacaaatttctgttttctaaaagccacccggtttctgacattttgttacagcagctagaacaaactaagcttttggctatcacatttttcatttctgggtcttccttcatcttatctgattttttccgttttgcacagtatcacatgtttaaaacggaataacttgccttgggtcatcttttttcctgtttgctaccttgttttctctgggctccttttaaaaacattctctttactatattgtgtgcctcctccagtttccttgtgtttgtttgtttggggtttgtgtggttacctctttttggtctacctttcgtgttgaaggatttcatctacctggtcatcctcagccatctgttaacagtggatggggaggtacagggaagctggctggagagtgagctgtgtatcttgtacctgtgcttctagattccatcctcttctgctctgctctgccctggaggctgatctgcatggcagcatcaccggagcttctttgcactctggactccagtggattcagccaatgaggggcactggcaggaggtcagacacagagaggagagaatgtctaagaagtctgtgtcccggaaccctccccactgagctgtgatttggcagtggttgcattcttcttctgaaggtgacagtccctgtggttgtccctctctgatagcctcagcctttcttgggttctgggaaataatcacagctccactctgctgctcaccccaggggcttcacggtcccttgtggtttctctcaccatacctttcctctacaaatcgcctcctcattaaactcttttctgcctgcttctgagtctgtgatctgtatttcttgccaagccctgatcacaccagaaacttcatgtgcttgcctgtcagctggtggacttcatggcaacatggctggcctcttcgctggcacacaccagagtatacatgtgttggtctgctggggctgccagagtaaagtcccgcagactgggcagcttaaacgacaaaaacttattttctcacagttctgggaggtggaagtctgagatccagatgccagcagggtgagtttcttctgaggcctccctccttggctcacagatgactgccctctccctgtgtcttcatgcgatggttcttcggtgtacatctggtgtctctgtgtccaaatttcctcctctcataaggacaccagtcatgttgggtttcaaaactttttctcatggccttattttaacttaatcaccgctttaaaggccccatctctgaatatgccaattctgaggtactgggagttaggatttcaacacaggaattttagaagacacagctcagcccataacagtttttatctggagctgtttctctggataagttaagtacgatggggtctgtctcttcaaaataatcctctaatccatggtttgataagtgcacactgggctgcaggtctttgggaacaggtcagaggaaagggccagaaaaatggccccactgttcatgatgaaaaatttcaaagaatccccctatagttggccctcgggctggtctgcaccctcttctgtgtgtacagaatcctaaaatagcttggttcaatgtctccagagaataaactgacctcctgcctttggggagagggaaacctgggatcagggaggcacccactgaatcctctatcagactgtctttcagcactgcccttggggtatcgtgccttggcccaagggctattgtgggtttctgcaggatgcaccagctgacttcttgctgctactctcctccatagccacttagtttatgtttttttctgcctttctgcctaggtatgttaccaccagttcatctacaaattctcatagggagagaatttagactggcagatattcagcctcagagaaggctatttgtagatattagctgtttctcttctaaagcatctgtgttagtccgttctcacactggtataaagaaatacccaagactgggtaatttataaagaaaagaggtttcattgactcacagctctacatggctggggaggcctcaggaaacttgcaatcatggcagaaggcacctcttcacaaggcagcaggagagagaatgagtgccagcaggggaaatgccaaatgcttatacaaccatcagatcttgtgagaactcattcaatattgtgagaacagcatgggggaaacttcccccgtgattcaatttcctcccactagatccctcccatgacacttgggaattattggaactacaatttaaggagagatttgggtggggatatagccaaaccacatcaacattattctaggaatggcttcttctttatgttctttgtacttattatgttttgtttatttctttaccatcatcacagtcatttggagaggaagtgaagacaaaggtttggggtcagtctgccatgtttcatcagaggctcacatagaatttactctgcacagtcccacagtcccttctacccactaaaaaaatgacctcagcttactggtatccaagcctatataacaaattctaacagaggggctgaatttcagattcttttggtattgggtatttctgttcacattttttagcataaggcaagtgctttttgccttggagaatttcattatttaataatcagcttccctcaaaattctctttctactataacctggaaagaactcaagaactttaattgtataccacattctaaaaatcttccttgcaagcatagatgttgtataccttctgctcaggaccacccctttttattattgtaaatttaaataacttttttgttttagaatagcattagatttatagaaaagttcaaagatagtacagaaagttcctggatgcccctcttcagtttctctgattgttatcaactccattactgggtacattgttgttacaactagcaacaaatatcagtactttactattaactaaatccatatgttattcagatttcagtagtttttccctcttgtcctttctctgttccaggatcctacccatgatacgagattacatctcatctttgcgcctcttgttttgtttgacacagagtcttgctctgttgcccaggctggagtgcaatgttgcaatcatggctcactgaagcctcaaattcctagcctcaagcaatccccccaccttggcttcccaagtagctgggactacaggcatgtgccaccacaccaggcccctcaggcttcttgaggcttttttgttctgtgaccattttttagacttcccttggttttgatgaccgtcatagtcttgaggagtcctggtaaggcattttgtggaatgtccctccttttgggtttgtctgacatatttctgatggttggactgggggtttgggagaagaccacagaattgaagtatcgcaccctcacagcatatgaaaggcacataatcggcatgacttcttgccggggggtggtaagttttatcagcttcaaagctactttcccttttccacattctgctctgtggaagtgcataagagccgcccccgctcaaggggtggggagttaaggctatgtctctttgaagagtcgtccccttttttatttttgcaagatgacaaatgattgcaatggccggagcctatccatagatgcgtagatacttctctctatgtttgtgaaaacacatcctcaattaaagacaaaagccatcttgtcctctgctcccccctacatccttcctcctcagataaaacaattgtctcctcttctcagaaaccaagtctctgacctcatgacaataggctttttctacaagaaagcaggcccatgttaggcagtctcttggggggtcgaaagggccaaatgtgtacttagatgtggatttcacagagtgattaggtatgtggatgtgtttgtttgcactaagccacatgttctggcatgaagagctgaagatggcacattacagacctggcgcagtgtgcagaggagtgaaggcaccctgctttggtctcctttgtaccctgggcagatctgttttcaattgtgtgggacgtggagagcatttcttggcaattcccccacccccaggctcttcaggggactaatgaaataagtgtgcagaaagttctgcatgctccttggaagaaagaaaaagcctgatgctgaatgattgccgcttctcatgatgccaaccacctctccctgagccacatccgcagagcctcagtttctacggatgggaggaaaccatgagctctaagtaaaggagtggattttcctttagcactagccaacgtggatgtgaaagcctgcaggaaaaccacaacaccgccttcaccgactcagcagccccaggagcgcatttccccttcactgcacaccctggagccgctggttccctaaccactgccagcttgcataggctgtggctcttttttttcttcatttccttcatttcactgaaagaagttgtggcatatgaatatttggggtgtccttttactctttggcctggtttattactattccacacaccttcagtttataccaagaggaataagcagaatagttctcaagttattcctggaattatatacaaaatttagatggttttgaatgtcctggtcgtggtggacccacttagtttgaattcaatgatcactgactacaagagcaccacttgttcatggtgaaaattataaactacaaacagattaaaaggagctggaatccaatctccggttcattcactcattcactcattcacgtaagataagctgagcttgcctacttgttcagcaaaactgagggccctgaggacaaagaagagaggggcaggcagccctgtagaggttattttaaagaagaccaagcaggggacagtgcgtggggcacaacgcatgaaacagttaacattcaggctccacacactgcttccagaaacacacccaggaaaaggtgaggcccactgctgagttaacagttggcccacttacagaaagactcggggttacttttataaagaaagcagagaggctatatcccttccaaacaaatcccagatgggctgagacccttttctgtaaaataaacatgcccagaacttaggaagtgcaaggggaagcatttacagggagatctgaagctgccaagagtgagggggagcagtgagctgaggaccacatcaccctgagctatctgacggtggcctgtgtgctggcctcttttgtgaaaatcgctgtgccactagaatttggaactcactttggccactagaattccagacacaataggatctgttttttttttttttttttttgaggcggagtatcgctctgtcacccaggctggagtgcagtggcgcgatcttggctcactgcaagctccacctcctgggttcatgccattctcctgcctcatcctcccgagtagctgggactacaggcacccgccaccatgcccggctaattttttgtatttttagtagagacggggtttcaccgtgttagccaggatggtctcgatctcctgacctcgtgatctgcctgcctcggcctcccaaagtgctgggattacaggcgtgagccaccctgcccaacccaggatctgtttttaatgctctaggatggtcacctgtaagacatgagatttgtttgtaattttattaaaagtatatatcaagctactgccatgacatgtgcttttcatttcagtggttggggtacccatttatattataataagcaaataaacagtatacaatgcaaaggaaagtgtgtatatgtgcgagtcatgtgatcatgtttgggtgtatgtatgtttgtgggaatagtagagtttccaggtttagcaaataaaaggacattcagttaaattcgaatttccaataaacaacaaatagatttttagtataagtaatgtctcaaatgttgcatgggacatatctatactcaaaaagtattcatcgtttaactgaaattcaatttaactgcgcatcttatacctggattttacctggcaatcctcatcagtgtgagtgtgtggagttgtgtcagcgttgtgtgagtgtgtgagtgtgtgcatgcacatggcagagccgggggagggcaggggggcctatgtgaggaacgtgggtgaaggtgccacctgccaatctgaaagatgtagcctgacctcattcttcatcctgtcctccagaaagaaacaagaccaatcacaaatcacacattgtaagttgtgataatttccaaaggttttacacatattaaaagtataaactttgaaaacatttatgactttgataattttttatcagcatcaggaaacatctggtctagtgaattttcagctcagggattgactgactctgaaagacttttcccccagactcagagtccctgaaacatcacttcctctcttactgcatatatgaataactatttttaaataataactttcacttcattaatttaacgcctggggctggatgcagtggctcatacctataattccagcattttgggaggttgaggcaggaggattgcttaaggccaggagtttgagatcaacctgggcaacacagtgaggcatagtctctacaaaaaataggctgtggtgggaggattgctgaagctcaagaggccaagcctacagtgagccatgatcacaccactgtactccagcctgggacatagagaaagaccctgtctcaaaaaaaaataataattcaatacatgagaaaattatttaaaaaaatctaaaatgcagtggctgcattatgcaaggaaaaatatttataaaatagaaaacaattgcaaatacttaagtgtcctaagaaaggatgccgagttcattatggtccagtcacacaatgaaatagtatgccctcagtaaagcaatgttcatgagagctttgttctgtgcagactaaaagcaaactgaaaaacgacaggcaaaaatgcactcacaaaattatttgtctgtgcatatgaagtgtatgaaaatgctggtagagaaagaaaaaagcatgtattgttactaaggtaaaaaaaaaaatgacatgcagtaaaattttggtagaattttgtgtgtgtgtgagtttaaaataattttttggtcttttcatgctttttatttatttttattattattatactttaagttttagggtacatgtgcacaatgtgcaggtttgttacatatgtatacatgcaccatgttggtgtgctgcacccattaactcatcatttagcattaggtatatctcctaatgctatccctccctgctccccccaccccacaacaggccccggtgtgtgatgttccctttcctgtgaccatgtgttctcattgttcaattcccacctatgagtgagaacatgcagtgtttggttttttgtccttgcgatagtttgctgagaatgatggtttccagcttcatccatgtccctacaaaggacatgaactcatcacattttatggctgcatagtattccatggtgtatatgtgccacattttcttaatccagtctatcattgttggacatttgtgttggttccaagtctttgctattgtgaatagtgccgcaataaacatatgtgtgcatgtgtctttacagcagcatgatttataatcctttgggtatatacccagtaatgggatggccaggtcaaatggtatttctagttctagatccctgaggaatctccacaccaactcccacaatggttgaactagtttatagtcccactaacagtgtaaaactgttcctatttctccacatcctctccagcacctgttgtttcctgactttttaatgattgccattctaactggtgtgagacagtatctcattgctgttttgatttgcatttctctgatggccagtgatgatgagcatttttatgtgttttttggctgcataaatgtcttcttttgagaagtgtctgttcatatccttctcccactttttgatggggttctttgttttttcttgtaaatttgttggagttcattgtagattctgaatattagccctttgtcagatgagtaggttgcaaaaattttctcccattctgtaggttgcctgttcaatctgatggtggtttcttttgctatgcagaagctctttagtttaattagatcccatttgtcaattttggcttttgttgccattgcttttggtgttttagacatgaagtctttgcccatgcctatgtcctgaatggtaatgcctaggttttcttctagggttttcatgattttaggtctaacatttaagtctttaatccatcttgaattaatttttgtataaggtgtaaggaagggatccagtttcagctttctacatatggctagccagttttcccagcaccatttattaaatagggaatcctttccccattgcttgtttttgtcagctttgtcaaagatcagatagttgtagatatgcagcattatttctgagggctctgttctgttccattggtctatatctctgttttggtaccagtaccatgctgttttggttactgtagccttgtagtacagtttgaagtcaggtagcgtgatgcctccagctttgttcttttggcttaggattgacttggcagtgcaggctcttttttggttccatatgaactttaaagtagttttttccaattctgtgaagaaagtcactggtagcttgatggggatggcattgaatctataagttaccttgggcagtatggccattttcacgatattgattcttcctacccatgagcatggaatgttcttccatttgtttgtaccctcttttatttcattgagcagtggtttgtagttctccttgaagaggtctttcacatcccttgtaagttggactcctaggtattttattctctttgaagcaattgtgaatgggagttcactcatgatttgcctctctatttgtctgttactgatgtataagaatgcttgtgatttttgcacattgactttgtatcctgagactttgctgaagttgcttatcagcttaaggagattttgggctgagacaatggggttttctagatatacaatcatgtcatctgcaaacaggaacaacttgacttcctcttttcctaattgaatgtcctttatttccttctcctgcctgattgccctggccagaacttcggacactatgtttaataggagtggtgagagagggcatccctgtcttgtgccagttttcaaagggaatgcttccagtttttgtccatttagtatgatattgactgtgggtttgtcatagatagctcttattattttgagatatgtccaatcaatacctaatgtattgagagtttttagcatgaagggttgttgaattttgtcaaaggccttttcttcttctattgagataatcatgtgttttttgtctttgattctgtttatatgctggattacatttattgattttcatatgttgaaccagccttgcatcccagggatgaagcccacttgatcattgtggataagctttttgacgtgctgctggattcggtttgccagtattttactgaggatttttgcgtcaatgttcatcaaggatattggtctaaaattctctttttttgttgtgtctctgccaggctttcatatcaggatgatgttggcctcataaaatgagttagggaggattccctctttttctattgattggaatagtttcagaaggaatggtaccagctcctccttgtacctctggtagaatttggctgtgaatccatctggtcctggactttttttggttggtaagctactaattattgcgtcaatttcagagcatgttattgatctattcagagattcaacttcttcctggtttagtcttgggagagtgtatgtgtcgaggaatttatccatttcttctagattttctagtttatttgcgtagatttgtttatagtattctctaatggtagtttgtatttctgtgggatcagtggtgatatccactgtgtcattttttattgcgtctatttgattcttctctcttttcttctttattaatcttgctagtggtctatcaattttgttgatcttttcaaaaaaccagctcctggattcagtgattttttgaagggttttttgtgtctctatttccttcagttctgctctgatcttagttatttcttgccttctgctagcttttgaatatgtttgctcttgcttctctagttcttttaattgtgatgttagggtgtcaattttagatcttttctgctttctcttgtgggcatttagtgctataaatttccctctacacactgctatgaatgtgtcccagagattccggtatgttgtgtctttgttctcgtgggtttcaaataacatctttatttctgctttcatttcattatgtacctagcagtcattcaggagcaggttattcagtttccatgtagttgagcggtttgagtgagtttcttaatcctgagttctagtttgattacactgtggtctgagagacagtttgttataatttctgttcttttacatttgctgaggagtgctttacttccaactatgtggtcaattttggaataggtgtggtgtggtgctgaaaagaatgtatattctgttgatttgtggtggagagttctgtagatgtctgttaggtccacttggtgcagagctgagttcaattcctggatatccttgttaactttctgtctcattgatctgtctaatattgacagtggggttttaaagtctcccattattattgtgtgggagtctaagtctctttgtaggtcacgaaggacttgctttatgaatctgggcactcctgtattgggtgcatatatatttaggatagttagttcttcttgttgaattgatccctttaccattatgtaatggccttctttgtctcttttgatctttgttggtttaaagtctgttttatcagagactaggattgcaacccctgcctttttttgttttccatttgcttggtagatcttcctccatccctttattttgagccaatatgtgtctctgcacgtgggattggtttcctgaatacagcacactgatgggtcttgactctttatccaatttgccagtctgtgccttttaattggagcatttagcccatttacatttaaggttagtattgttatgtgtgaatttgatcctgtcattatgatgttagctggttattttgctcattagttgatgcagtttcttcctagccttgatggtctttacaatttggcatgtttttgcagtggctggtaccggttcttcctttccatgtttagtgcttcgttcaggagctcttttagggcaggcctggtggtgacaaaatctctcagcatttgcttgtctgtaaagtattttatttctccttcatgtatgaagcttagtttggctggaaaattcttttctttaagaatgttgaatattggcccccactctcttctggcttgtagagtttctgctgagaggtcagctgttagtctgatgggcttccctttgtgggtaacccagcctttctctcttgctggccttaacattttttccttcatttcaactttggtgaatctgagaattatgtgtcttggagtcgcttttctcgaggagtatttttgtggcattctctgtatttcctgaatctgaatgttggcctgccttgttaggttggggaagttctcctggataatatcctgcagagtgttttccaacttggttccattctccccgtcactttcaggtacgccaattagacgtagatttggtcttttcacatagtcccatatttcttggaggctttgttcatttctttttattcttttttctctaaacttctcttcacagttcatttcattcatttcgtcttccatcactgataccctttcttccagttgatctcgtcaattactgaggcttgtgcattcatcacgtagttcttgtgcctcagttttcagctccatcaggtcctttaaggacttctttgcattggttattctagttatccattcatctaattctttttcaaagtttttaacttctttgccattggttcgaatttcctccttagcttggagtagtttgatcctctgaagccttcctctctcaactcgtcaaagtccttctctgtccagctttgttccattgctggtgaggagctgcgttcctttggaggaggagaggcgctctgatttttagagtttccggtttttctgctctgttttttccccatctttgtggttttatctacctttggtctttgatgatggtgacatacagatgggtttttggtgtggatgtcctttctgtttgttaattttccttctatcagtcaggactctcagctgcaggtctgttggagtttactggatgtccactccagaccctgtttgcctgggtatcagcagcagtggctgcagagcagcggttattggtaaaatgcaaatgctgctgcctgatcgttcctctggaagttttgtctcagaggagtacccagctgtgtgaggtgtcagtccgcccctactggggggtgcctcccagttaggctactcaggagtcagggacccacttggggaggcagtctgcccgttctcagatctcaagctgcgtgctgggagaaccactactctcttcaaagctgtcagacggggacatttaagtctgtagagtttatttctgtcttttgtttgtctgtgccctgcccccagaggtggagcctacagaggcagacaggcctccttgagctgtgatgggctccacccagttcgagcttcccggccactttgtttacctactcaagccttagcaatgatgggcacccctcccccagcctcgctgctgccttgcagttcaatctcagactgctgtgctagcaatgagcgaggctccgtgggcataggaccctccgagccaggtgcaggatataatctcctggtgtgccgtttgttaagcccattggaaaagcgcagtattagggttggagtgacccgattttccaggtgctgtctgtcacccctttctttgactaggaaagggaattccctgaccccttgtgcttcccgggtgaggtgatgccttgccctgctttggctcactcacagtgcgctgcacccactgtcctgcacccactgtctggcactccccagtgagatgaacatggtacctctgttggaaatgcagaaatcacccatcttttgtgtcgctcacgctgggagctgtagactggagctgttcctatttggccatcttggctccacccctttttatgctttttataataaatatgtattactttcaaaattggagataaaattttggaagcaaaataagcatacagaaaaatatgctttccattgttgtgctatgggtagcaggccgctgagacctggatccctgacaccatgttcagctagagcttcatgggaagccctgggagttcttgtagagacagaagccaagactggctgtcacacctctgaccctgaaaaaaatgtttcatggacttctacggcagcaagtcagatgccctggggtctacctgccagcactgggacagtgcctagcagcaggggcacagtcagtgtttaggccatggacttgagagacaaatgtcctgcttttggctagtgatggctaagtggtggctgtcacccttgcatgtgggctagcattggcttatggaacttcagtcaaacatacaagtccacatgccctgggagaaggacctagaaatcagaccagcccctcagccctgggagaaggacctagaaatcagaccagcccctcggaactattgaagtgaaggatttatttccattggctctctcacctattccttcatgttcttgtatatacaactctagcttgttggcttctgtgtctcccatttctttgttttcctcctgccttaatgcagaagtgcacttgaagatgggtgtgtttgctccaagatagtccatgagatctctgagccatgggatagtcaaaggaagagcagaagcctggggctgtgtgggtgtctgggcccaagggagggtttatgcagagcagtaaaaacaactgacccttcagaatcggtgagcttaaaagtgactatcttaaaaatcaaaaggagaatattgtattatattaaactctgccatagggcatggctccatgtacacagatctgggtatactacttgtggaagtcactttctgtcttgtcaacatccattcttccctcccctatttcagaaggctttggcggtggggcctgactggtctcagtccttgaggacacccatcccaccccatcctgcctctcccatggtgattctctccataaatcctggttcaagaacagacacataacccagtttggtcaaagagacatgagatctgggcccctggaaaagacactctcctctttggatggtgaggcatgtgagtgtgaaggtcagaactgctgcagccacgcagtgagggaagccagcgggccctgggatgaagctggcaggatagatgatgtcttagatccagttgttaaaccaacatggaagggccttctgatctctgggctttttaggtgtttcttatggtttctagaaacaatgtttcttttattgttcaaactggtttgcatggagttttcagtcatttacacagaaaacctcttaattggtttccacaggggttatattttccacaagcatcagtgagaataatgaatgtgttggataaataataagaattgggaaattgctggaaaatctagggtctctagttgtcagagaaacaaaaggaaagacatgagatatgtgtccaattaaagagtaatctaagtccccaagttcaaaaccagggaattctggctgggtgataacatgattacttcacaaattttaacaaaacctatagccaattaggcctcaattaccacaaataatttagtccagcagtctgtaggaataaacaccaagacacatttttttactgcctttttcacttgacactttaaataacactaagggaaacatgagatcaattgtaaagaaatgtggcccaggttgaatagccaattaagaaaatattcatgtgacccattttaggaaaacctgatacttgaatatccttccatctagaaaaactaatagtttaggagtaatttttaatacagcatatcttcttaaaagcaattcaatagagggtttaaaagatgagccacgaaaatgaactgaaacaaatgaaatgttggttccaagaaatctccaattttcaaatttcatgtttatcaactaggatgccttcactgcaagcaaagaggacttttcacacaggcacaaacagtaagacaacgtattacatttgttaagaggacgtttagggtgctgtggggttctgggctgtgattcagccgctggcgatgctggcaggaaaggtcctccctccctctgcttggccatcctcagtggctacatctgctccccttgtagttgtgagatggcttcaggagttctgggtctcaaacccagacatttgacatccagggaacaggacagaaacagaccatctcttcacaggattccttaagaatgagggaagcttttccagagggttctgcagccatctgtttttgacatgttggtcagcactaggtcagatcccacccccagcccattgccaggactttgtgactacaagatctgcacagcctggaccagccacgggaaggggtggagttgtgagttgtggcctctgggtcacctaggaaatgagtggatacctgaacaaaaccaaagtttgatcaggaatctattctagttacattgttctagattagcagtttctgaagacatatgaattcagttctggcttgaattgattggctaagaatttaaaacacttttaaattcagatgagagtgtcaaggtcagatgaatttaggggctagcaattagggcaattttttccagatgttacttcagttttagtctgctgtttcaaatatacggtaatttactttgtagacatgctgaacacacaacttttgagcatcaatgtatcgtgaaaataaggattacttatgcttgctttggatagtattctgacagaaaaatatagatgtactccaatggtagtactgagaggtgctttggaagtcgaatttctgttgcttcttataaagtattaaaatgtcattttaaatatgccattctttatatctgatattaaaatttccataaagacatgataattaaattttataggtaactgaagaatacaattaatgcaattccaaacatgtagtaattagtttgattgacatcaaatatggaaaaaagaaaagttgaacttcttgtgtctaaacgtattttgggaataatccccataaaaaaattcaaccttctcaaaacagcctattttaacctaatttggtgaatatagatttgtatgataatgctatgttgtttatcttgaggtatttggggatgtgaccagttttagccaactcccaaataaaaattaatccaaatagcatttctggcagtttccgaaattgttaagctgatttgtcctgctgcagcttgtcatgatgaccatgataactgaggcaggtcaaatggcttctttatattctattttagttgtgaaagacgttatttggccagatgtttctagaacccaaacttagacttgaagaacacttccaccatcaccattgttgcttccttgtttgtccatttctctggcaaagggaatttcattgctgatcctgcaatattctgaaaggctgatttgctgctatgcctgtggaaaaataacaattttatgtgcattctcatctgtaacccataggtgatattcaaattgttcctatctgagaaactctaaggagctggcctttctctaacaagtcctttggtgcagtggggaaggaatgctgaggttttgcagcctcgtgctgctgtgtgggttgattccagtgggcctctgctttggtgcccaagacaaccacgtcggcatcacctgggaacacactagaaatgaaagtcctggggctgcccaagagccatctgggcctggcccacccatctgtctgctaaggagtcctcagggggatcctgatgccctctcaaatttgagatccactggtttagattattttttattatttctcccctcaaagagctgcaatttgataatagtgaaaaatgggtctatattaatggtgtgtgtgtgtgtgtgtgtgtgtgtgtgtgtgtaaggggagggggttaaggtttagagggaaaattgtgaattcccccctgctataaccaacaatatcctcagtgtttataacctagcactgcagtttcccggccttgcagtgtgatggcagtactagaagcctggacccaggaggagcacacgttctgctactcatgaataagtcactgcaggagccccctggctgaagctcagtcccaagccagcactgaatggactgaatggcctctgtctggaagttttcagcaatgtgcactatgatttgggatagaagagttttgttcatttaaccaacaaccagtgtgtgcctgttctatgagatgcaccatgcaaggatgtcaggacctttacaattatgaacaacatttgactcaaggggtggataccatgtggtgtgagggccacccgaatggtgcactgccgtctcagtgtagcagagtggtcctccctaggatcactgaactgaaaaaaaaagtttccccaaccaggaggttctgatcccatgctcattctgcagttagcaacttcatgggatataatgaatggattcaagtatgggaggagatacagaagaacatcatttgctttttataacacaggtaatccctgtaaaccagcacccctctagagagtcatggggcctaatggctttctatgcttaaggattcagggcttgcctctccgcctttataagctgatgtgggtttatgcaaaaataatagtttgaaattaaatcctctaatagttttccttcataaaactccattgactctaggaaaattaaaaaaaaaaaaacctcataagcataggcctgaaacattctagaaagtgtgtggagctcagatgtgaagggcactgtgatattacacaaacctcctcaaagtttctgttttttctgaatggccttggggtgttcttctaaagagcagctgagtgtgagcaagttcagtctggctacagagtcaccctgccatccagggcaagtggacagaggctctgactactcagagacgggactgagaaggtcatgcaatgttttcatggggacatttcaatttggttattctcaggtcttgatatcttgatgctttgaaacacaattaagcattacaatttttaaattatcaaatcttaagcacagaagatgacctttggcccattcccgagaagccgtgggaagaccccctatgaaatctatagatgtggagtcagtgaaaggatagattgagcaccgtatgtgtggacatttcccccagagtctagctatatcctcctgatggtgtttccacgactgttagaaaaccaataaaaagagcattaaaacaccatcattttataataaatcattataaatcatgccttcataaagcagctgatatccaaaattttgttgaaatttttcccccacttgcaccattgtagaacattgtagcttgggagagacggtggctccatggagtgattcccacagaaagaggctggtcacgagaagagcagttgcccaagtgtgtgtgagtggcctcgtccctgaaccataccaggtcagagttacatctgggagcattgcaacaattttttgcccttttagggctagctgacttgaaaacgaccctgttggcccagcctggtggtaatccgtcaagctctgaacacacacctgctgaaagagatgtgaactaagtggcatatggtgttgagggcaatgaaccccaacagtcaagagagactgaacaggacagagagcaagtgtgagtgcagacacaagacaggtgaagtggcgccccagccccttaactcctcaaaggcaaaggggctgcctcgctggcccaggacagacagaggtaggcaaaagtgttaaacacctaaatagacttacagttacgtgactggattcaaagcctagctctgtatagacttcagactggagcaagtccctgatgtgttcatctaagaaatggccatttccacttgccccattcctttcccaagcaagatccgtgggcaggagagagtgcctggaaagacattttaaagcatggcacacatgttaagcttgatcttcagaaaaactggatctatttttgcttgattaattgtcaccataagtgtttcctaagatgtcttcaataaccaggaaaaaggcctcaagggcctttttctcgtgagttttcaaatggatcctcctgctgcctggcaagttttcctgctgatgtcaatctgtgatcttcctgtggtggaaagacaaaaattaaacaatgattcagctcaacagccgctcaaacatttacttggtgtggactgtgtgccaggaaatatctggttgctaatattcattaggcggttttggcctgtgctcatcctgagcctgtttacctcttctataaaatggggataaaacaacttataccctgtcgtggtccatttggcctgctatcacaatttaccaccttctgagcagcttgtaaacaacacaaatgtgttactcacagtcctggagtctgggaagtccaagatcaaggtgccagcagatttggtatcagatgagaacctgcttcttcacagacagggtgctctccctgtaaccttacatggcagaaaaggaaaatagctttcatggtttctgttagaaggatacaaatccaattcatgaacactccacccctgtgacttcatcttccaaaggccacaccccctaatgccatcaccttgagggccagcgtttcaacatatcaattctgggggtgggtgcaaacgtttagttcatagaacaccctttgcctattgtgagaatcagatgcaaatggtccttgaagatctcagctaaccataaaaggcatgctcatggaaggaattgctggtcttttccacaaaggcaagctgagttccagaactgtccacaaagctgtgcaggacattgtgagtatttaacgtttcctttcctttgcctcagatccaagatgaccacaaattgttccaacaaggcatataaaatctctacttaagacgggaccagccaggccagcctctccttctgttccatccacagaccagacccaagcaattttatcttaagtgctgcctagtaatacatcaaaatcaaaggcagatttacaaacactctgaagacaccggtcaggcaccccataaagataactgtgaaatggagactgtgtctctttgtgataggttccaagtctctgtgctgccctcaaatgttttctccccacgcattttttcaataaaccattgaaggaaactggacgttctttgaagtgagaggtgtccttagagtggctcttgacaagtcctacttctgagaacccacgcagggtgtctaaagccagcatccactctggtcaggaccatgtcttggcattcgggcatttagccttcccagctgattgcattgatcagatttgcttcaggctggctccacaacagacaaacacttgtaggaggcagaaggtgggagctggtggggttggttccctgcccacgtccccaaggccctcaccactctagtccccacaatcgaggactcgcccctccccaaaagagcctcctccctgcccatggagacaggctagaaatgccacggagccaacacttccaggagctacccgtgggcaatgacagacaggacttggtgggtgagtagtcacaccggcctcctcagcccaggagcaggcacagctaaccctgcagtatgttgtacactgtttcctagagccctcccatgggattcagccccagtcgcctgcagcggaaacctgctcaccagcaccccacgcacctgcagtggaagcctgctcacctccaccgtgtatcggcttgacccctaccgtgtcttccttccccactttcctgacgacgcatcctgggctcaccttcggaaaaatcacttccctcaaatccttgtttcaagacagctttgaaagttctctcaacaagacagaaacaaagttttggggataagaagtaactgctgaagctattttctctcctacaatgaataatacaaagttatcttgttgtaggggccttctaacccttaaatcaccattggtgacctggacccagaagcctccgtaagaatcctcttgtggtgaccactcttagttccatctgaaaactgactcagaaagttcaccaaggctcactgttaatcccagagtgtggcctctgggcatacagagggcagaatgaaagcatgatggctctgcctgcagtctctgtactaagggggagtttaagggtaaattgagagaatgagaagggccaatggagttgctttgctcgtcagaggtgtgtcatcctgtgccacctctaataaagctgtcatcatcactggcacaaagagatctgagcccaggaccagggacaaaggccaccttgctcattccagggttcccagtgctacacagagaagatgctcaaagcagtctgtgtcaagcacccaggagaaagcaaggccacagctgcagcaggactggttcggctggtcaagataaaatgagccattttcagattcagtttggtaaacttacatacagaaagaaggactaaatagctaaaggtgctagctcccaagtcctcatcccacacaccaaacaggacaacttcaaaacaaaaggggcccatgactgctacagacattgctgggccaatcccgtgctgagctgagcagaagaatccgcacctggagtgcatgaggcagaaagcctcaaattgcatcagaacccaggaggcgatgaggaaccatctcatgacagcctctcaggcagatgaggcaagatagattcgaggtcctcacaggacttccaaaaccttggtgttctgggagatcgcaaagcgttctgccaagactcagagtcaatctggttcatgtctttgcctgtgtggcctgtgtggatacatgtgaggtcaccaggatgccacagtagaattattctcctatagtatagtgaattagcaaatgaattatgagcagaaatcagagcattctaaatgtcattcttctccactgtcatatttgagcacctacttatgccagatgttatattaaactttggggtgcattgtatctgtattacctaagattctccagaaaaacagaaccaacagagagatttattataaaaaattatataatgagattcattataagaataaatgtctaatgtaatcccagaggcagagaagtcccatgatcttccatctgtaagctggagacctggagaagctggtaggaaagctgatggtgtggcttaaagacataagagctagaaaactgttggtgtagaatctggtccaggcctgaaagcctgaaaaccaggaactctgagggcaggaaagggctgatgttccagttcaagcggtcaggcagagctaaagcaaacttcctccacctttttgttctaatcagactctccacagattggatgatgcccacccacattggaaagggccatcctcttgacagagaatgatacatttggtcttgatagtccttcaaacccaatcaatcaatcaatcaatcaacacagaaaccactaaaagtgttgtgtgaagttgcttagtctgtctgtatgagagtaaaatctgatagcagttagctcctcctcaaggaggatgactgaccccagcaagtcatcccctggaattatggaactaggtgtttttgtgcagcaggatgtcacatgcagatttggttgccagtgggagtgctgccatcctccctccatgtgattagcagagaagtgagtctgtgaagcagaaaaaaggaaacagaaacagagagggagggccaagagatggagatattgctgcttgggctcccacaacttttcatctgctagtttctgtccttttccaagatttgataacattcctatcacagagattcactgccctgagccaccccagagactgtgggttaagttcccttctatgtgtggggagatgctgtttcaactcaagttgtttctgtttcatgcaggcaaattattgtgttagtatacatgccaatttcattcactgaggaactagttccattaacaggcctcttgcaaatatctagactcattgattatttggcatacgcaacgtccacagcagccacacctgccacctccattttgactcaagagatgcttaagtggtggtggctcaaattgccacccttcagaaaattctgtgttgcccaagtccttggggattcatattcaatatgaaaagcaagagggaaacctatctccatgtagagtgagagagaacccattcctcagggtcatcagattctatttgaagatcttgccagaaacttggtttatataaacatgagtcttgtgatcaaagtcaagttttcccgttaaacttactaaatgtcacatcacaataataacaggcactgtttaactccaaactgagatgctttgagaaattatttcaatggctcttttgaatgcttttatttccccaacaggccaataaaccccaaaccctctgttatttcctttccacccactctgtgtttacaacatttattttctggctattgcatgctacacatgcaatcctaaacttagacataattgcatgatttccctgatatccctgtcttttgacagatgattacaaatgtctttagtaaatggtcaccatgaaaatactgacatggagtacatcacttttcttgcacacctggggtgtttacagtggaatgaatgttgtgtcggttatcattcctaaatctttcattgcaattgagagtcagctgttaatcatttaattttgttttcccagtttgctgtgtcttgtcatctcctattcttcccaggagagctccaatttttttaaatgccttgaacattttgttcctgcatataagaattaatgtgcattccagttggacgttttcaaatttgtaacaggagtaagccacgtgacctgcggcagcaccatctccatcttctccacgtgccccagcctttcctgtccacactcagcccattgccttctctatggcttctgtttgcattgctgccattattccatcttgaacttccaaaatccttggacatctgcctctcttattggtcactcacataatattatcaaggaaagtgaaaaacacataggtaaaggctaacaagtaaataagtaaattaatgcaacaagttttgctcactcagcatggtgcattttaggcactcaataaaggcaggttaaatccatgattaaaagccaaaaattcaaatgaacttgagtgtctgtaaaatttattatcccatatatgctagctgtctcatcttctgtaagagtttttttatgtattctgcatatgtgttcttaaaataatgtggtagtggtgcaaagataggcaagaacaatgagaaggattagggggtctagaagcagacccacctgatttaggcacagaaaccgctgaaaggcagtgagaaaattgtggtcttttcaataaagcactgggtccactgggcttccatgtgggataaaatggacttgacccctactccgtatgcaaaaattattagcagataaatagtgaatgaaaatgtgaaaagtaaaatagtaaagcttttagaagaagacagaatattattatgacagtatacaaaaggcagcaacctcaaaacaacatcaacaacacaaaaaaataccagactgaatatccctatccaaaatgcttggaaacagaagtatttcagacttcgaatttggcatgtaggggtgtgatatttgaatatttgcattatatactgtacttatggttgtgcatccctaatccaaaaatttaaaatctgaaatgctccaatgagcatttcctttgagcataatgtaaatgctcaaaagttgcagattttatagcatttcaggttttggtttttataattaggtatacccaattagtattgagaaaataaattatcttaaaaattagaatgcctttttaaaatatatcattaagatagtgaaaacacaatatatagacttagataagaaatttgcaatacatttatcatgtatgatttcaaagctagctcaaaacttctttggaataaaatggagcaaaacaaagaataactggcattgattgagcacttactgtgtatttctggctattgcatccaccattatctaatttaatcctcatgaaaatcctcaatggcagttgttactaaatccatatttcacaagatgcagggtcagtggtaatggtgcagggagttgtacttagacagattaagtaacttacccaagcccacaaagataacaaatggcagtcagaagccaaactctatcccacagctcctgtataatttcaggcctagctcttaaccagtgcattcagccaaccatcttttctcccatctttccatctgtgtatctttccttccattcatcctcctatccatctgtccattattcctttcttccttttttcctctcattcatccattgtgatacaaggccttaaatttacgtccactatcatgtgctaccttgacacctggtggaattgggaggacctcaaatggcctaattccaggtttccctccctactctgtttccatgataaggccccctagccaaataacactacttctaaagggggccagatgcagttcctgcttatccctgagtaacaggttttagttctttgccaacccacagaaatatttaaataaggcaatcacatcttcccacaggaaccagaggacacctactctctctctctctcttttttttttttttttttttttgatacagagtctcactctgttgcccaggctggagtgcagtggctcattcatggctcattgcagtcttgacctctccgggctcaagcaatcctcccatctcagcttcctgagtagctgggactataggtgcaccgtcatacccagcttttttattttattttattttatttttttttggtattttgtagagacagggttttgccatgttgaccaggctgggctggtctctaactcctgggctcaagtgatctgccctcctcagcctcccaaagtgctggaattacaggtgtgagccactgtgcccagtcattctaccctcttgacactacaaagcctacctcccacagcctctgattattcactttgttcccaagtgcagccccttgtgtggccctgcacagtgtgataatgcctacaattttacttgcgttttaaattgatgttttgtttaaatgtactatgaaaatatcacctctgcacatgcagacttaaggtctctgacacattcaacaatgcaaagatgacaggactgcagggaaggtacgcaacattctggcaaggcaacagtgaaggcttaagaaaggtcagctgggccggcgcggtggctcacaccggtaatcccagcattttgggaggccgaggaaggagaatcatcttgagcccagtggcgtgagacccacctgggcaatggaggaaaacctggtctctacataatataaaaataaattaaccagacgtgctggctcacacctatggtcccagctactcaggaggctgaggtgggaggatttcttgagcctgggaaatcaaggccgcagtgacctgtgaccacgccactgcactccagcctaagtgacagagccagaccgtatctcaaaaaatttttaaaaagacagataaaagtcagctggatttccaccaataaggagaatatgctcataaaagtgatgaatgcccttctcctatgggaaggacagtgcagggggctaacgcacaaggagtgactcccaatcagcccctgagcaggtcaccattagaggccccaagaaagaggggctctgaacccaagacaccctcagagccttggcacttagaatccctcctggcccagccagtctatgggtgggaagatttctgtggcagggcgaggaacctggctccagtctcaggctggtaccccaggcaccacccctcccctcctctgtcacgggagggttatgcacttccagttcctcagcagtcttcctccccagtcttgaacactgggaaaggtggcttccagcttactatttccccaagaatgaatttaaattcatattttgtcttttctactccaagaaatagaaaacttagagatgaaactggagagagaaaatattttacaacactcaaaactgtgagccttaaagtgctgcagtaaactacatttgaggaggtcaagtttcgcaagtcctcttgttctactgaaaacctcgcaattgtcattcaatcgcatggattcaatagtcatgcagtcccagggcttgtcagcccaggatatatacccaaggaacatgcctgggaccaggcaccatgctgtttataaagttctccaggtgattctgatgctgacgcagggtgaggacgctgagctactctgagcttccctagtcacaggtgaagccaggaagacccagacatcccaacaaagggtgagcccatggcccgcagtcatttaggatggaacttgcgatgactgacttggatccgtgttttcactcctgcacagcatgccatagctctgtcacaggtgagttagaaagaatgccggaaacattcatcttctcactctgcatcttcttaggagactggctgaaatatcagctgcctagaaagatccctacatttccagggtaaatctataccagatataaagcatgtggcaataaagtcacagggacagtgagagtcatataaaaggaattcaattctatcccattccacaaggatggcacagggacagaaaattacattgtttttacttctccccagtctaccaaaaattgagttgacctacaaccaagacacacacacagatgtgatgtttacacacagtaattttaggaaagacaatataataaaataaaaatcaggaatcagaaacagagaaaacatttttaaggataaaaagaaaaaaaatatatagacagatattgaatgaatcatgaagcatcacttgtagatgcttagaactaaagaaaataatatctaaatatgtattaaaggggatttaattaaatatattatgagatgcctatacaatgcagtcatgaagaatgaggtggcttatgtaatgacatgaggtcatctccaacacaaacaaaggcaatgcacattcaggccatagcctgcaccctgctgccacccttgggagaagagacccccagcagcagcggaggcctccagggagggaatcagggtgggtagagatgggaaggaggtgatattcgtgatatataccttgtgagtgtgtgtgtgtatatacacatatatgtatacacatacctatatgtatatatgtacacatatatgtatatatacacatgtgtgtatatgtgtatatgtatacatatatgtatatatacacatgtgtgtatatgtgtatatgtatacatatatgtatatatacacatgtgtgtatatgtgtatatgtatacatatatgtatatatacacatgtgtgtatatgtgtatatgtatatgtatatgtagatatatatatgtatatatacacatatgtatatgtatatatgcacgtgtgtatatacatagacatacaatatatacctatatatgtacatatatacacatatgtatatgtgtgcatatatataatctccaatttctcaaataaaaataacactaggactatcgtttaaaagaggtatatataatttttagagaaatagaaattcaagactaaaaagagaaaaactcaagtaacctagagaccttagggtcccgaataaatcatttaaaaatttccttcctggcctgtgaagaaaaggatgggaaaggaatagctgaactcaggaaaagccacctgaaatgaaaaacacttggggataatgtccccagccccacgtctgggctgctcagaagctgtgcaatttgtgagtggcagcattctcctctgaacccccagacactggaacactttcttcttcacaccaagaacgtgggtcttcaaggtgctgtctctggacactgcccagttctaacgggcacactcccttagagcaaagtccacacccacacagcctggccaagaattccacctcctccagtgtctgccacgacagatttcttcctctttggtcatgggcccacatggtggtgatgacaaacagtgccttgaggtaagagctatttcctggagacaaagtatgttctaatgctgaacatcttaggcagaatggcactctgaatgattctaaactataaaatctcctagcagggacccttgaatcatgccatgtaaacaaactaccacatctccccctcgagtctgttctgcttgtcttctgtcacgatcactctgggatcactgatttctatattttcccctggcctttctccctttactctccctgtttaagctgatagacaagctgaacacgtccttaccttggaggaggttgtggcagaggggaagaagaacttgtctgcaacaaacttcacttgcccgattgtgttttcccaaagcccgcacatgttggagattgcacctggtggctggaagagggtgggagaagctatcaggacagtgccctgggtggctgggaaggtgatgggcagtgtgagtcctggggtggaagcctggctatgcgctcagctgtggggcacccagaggggtggcaagacctgaggtttgctcagggagctcaaggttaacagagatcacacacccttctccatgaggccctaaagggaggcacctctcctaatgccgaagatggcagttaacaggaatttagttgtggggagggggttatgggtcagaatgaccttgatttaaggacgcagagataagtttatttcttgcatacctgagcatgtgggctgtaagtcctcatgcctgctgttgtccagggcttgtccactctcactataacttttggttttgatctgttttttttttcttttatttctatttttaaatagaagaggcttagccaggtgtaattccagtactttgggatgccaaggccagtgaattgcttgaggccaggagttcaaaaccagcctggtcaacatggcgaaaccccaactctataaaaaatacaaaaattagccgggcatagtggtgcatgcctgtaatcccaggtactcaggaggctgaggcaggagaatcctttgaacctgtgaggcagaggttgcagtgagctgagatcacgccactgcactccagcctgggcaatagagccagaacctgtctcaaaaaataacataaagcaaaataaataaataggagacacttcaggcagagcccagaaaggtcaaatgagagcctgtgagcacccgaagggcagggtcccggcctcaccctctgggtccccaagtttgacacaggctcagaggagagcgggctccgccagtatggtggatatggaggacagaggaggttgtgctttctggcttcctgccaatgtgttttatctgcgagaccacatcaatcctcctggaagaaacagcaggtcttccagacaaatccaattgtcctagagagtggagaacacactaggggcttgtgcagtgccctttatgaaggggaaccccagagttcctggtgagaaacagccgtaggtaacagacaccgtctgcacccctgccccccaacccacctcaccatggggtgggcgaggtcccagagaatgacctgctgggactggaaaggtcccacccatagccttggactgtttgttctcaagaagcccgccaatacgtgggataaagtgctcaaagatgacagctggagatacaactgaagctccttactgcccttctgtctacaaaaatgacgtgacaaaaagcaggcttggatgagaaaagaggagattagacactaactgcatttcccactaaaaaacacagaaattttgccataaaacccacaaataattttagagaagtggatgctgtggcaggattctgctgggagctgggttgtgggagggaggtgggctcagggacaaggaacttcatgcatctaatctgccaggttaatgggattaaccatcatcatttttaactttcccttcaggggaaatttgactggaaagccgttccccagctctataacccagcctctgcagaacaaatgggacaggcggctactgagaatacagggcacacaccactgccaatgcccctccctgggcaccactctgccccatccaaccctcttctacagaggctcctgatggaaaaacaaacaccaccacctgtgggctaaatatcaactaaaattttgtttctttagcctgcaaccttttttaaaaagcaattgcaaataatttttcatcaaatgtgaattttggtaaaattactagatgtagcaaaataggccccatagtactacatgatcagatagggctgaagtgcagctctccttttagatggggaatagcatcccacctggccatggtccccaccactccctattgccctactaccttggtccactttattaacttaaattattccctgacccctgtagacatttgggaccatgacctctgggatcctggaaacagaaaacctttcaagacccagctctgtcgtggtgtggcaggatggctctccagcaagcatttaaccatcaactgtagacttcccagctctaacagcagccatgatatctcctgctgatacctcacaaggcagtagtgacaccagctaggatgggcttgaaatggtttttgaagattacaaacaagtttattcttgaagtagtgaggcaagcaccttttgccatcttcgattaagtgtccctgtggatatggccttaaggcacttccttctgatgaaaatgctgtcctattcctccaggtctacacacagggtaggcctgggacacacccaggtcggtcacctccctcacaggcatttatgccaatggtctctgctcagagaattcaaggtgctcatttgaagcctgctgagtatgaaattgataacttcctttgctatttcagttcacaaactatgacccttttatgtgaaactctgaagaccctcctagcacacacctggattctgagaaagctttccaattatttttttctcaaacgaaaattctgaagcttactttgaaaggatctagatttccaaagacagggcaatgatgttctgagagtaattgaggctggcaaacatctccacttaagacagctgtctgcctctcacactcacattaggtacaccaagctatgtctaaccctccgtttcatcattgcaaatcaacaccttgcaaaataaatgtacaacagccctcccctcaagccctttccaactcccatcctggtccagagcaaaagtcagcagaagctgagagtgaaatgatggctgattatggcagttgggctgacactgtcagtgaagctactaggtcccactagttggtgggcatggctttcattgctgataagaaggtacactatagctgatgcctggaccaatcccatttggacttaacagtgatgctcttgaagtggtacagcatataattaattgaaaatttcacactgcagggtataaatgtgccctatataaaaatgtatataaattgtatataaacaaaatctgaatttagtgaacgtactgttttgtttaaaattccaaaacgattagtgaaacaagattcatttggtcctcattttacatatctaggatcgttagctttttcctaggaatgattttagagaaggagggagaaattaagaaaataactagaacattgaaagcaagtagctgctcccttgctgaacacatatttgacaatccagattatgttcatccctggggacagtgcagtgcacaagcagaggaagtttctgctgtcccagagccagagacaaaaaaaggtcagtagacacataattgcacagctaataatatagtgctgagtcatcctaataaaatgatcaaacgttggctcccgcctagtctgaaaggtaggaaacacggtcagacaaagaaatgcactgatggtttgtcaaatcggtagaaattggcaggtaaaaattaagaattggaagtaacacccagatgtgagttaaagaaagcaccagccaggcacagtggctcacatctgtaatcctagcactttgagaggccaaggcaggcatatcacctgagatcaggaatttgagacaagcctggccaacatggcaaaaacccatctctactaaaaatattcaggtggtaacatttcagcttttagaagagactaggggccaggctctgtggctcacacctgtaatcccagcactttgggaggccacagtggttcgatcacctgaggtcaggagttcaaaatcagcttggccaacatggtgaaaccctgtctctactaaaaatacaaaaattagctgggtgtggtggcagacacctgtaatctcagctacttgggaggctgaggcaggagaatcgcttgaacccaggaggcggaggttgcagtgagccattgcagtccagcctgagcaccagagtgaaactccatctcaaaaaaaaagaaaagaaaacaccaggtataggaaacagtgtgtgcaaaggccctggggtaggaattgtgctggactgtttagcagaaactgcagtttatcagtgagcctgagacaggctagggttcaacaggcaaaagataagggtgaagagctaagcaaggtctcacaggtcaaggtgaagagccaggatgatgttccctcagccttggagaaccctgaagctctgagctaaagagtggcatctctggtctctttcatttttatttatttatttttttgagacagaatttcactcttgttgtccaggctggagtgcaatggcaagatctcagctcactacaacctccacctcccaagttcaagcgattctcctgcctcagcctcctgaatagctgggattacaggcacctgccaccaagcccagctaatttttgtgtttttaatagagacagggtttcaccatgttggccaagctggtttcgaactcctgacctcaggtgatccacctgcctcggcctcccaaagtgttgggattacaggtgtaagccactgcgtctggcccctagtctcttctaaaagctgaaatgttaccacctgagtattttgatttcaatctttatttctaattcttctaaagttatagcaaaaatattttttaaatatgcttgccttgcatccattgctaaccccagcttccagctctcttgccagggcctggaaaacaatggagaaatagaaagggagcgaatgttcacttcactgcccagcattcactcccaggatggggaacaccatgagcatggcaggtgctcctaaagctgcagagcctgggggtggcagggaggcacagccacccaggtgagaccgtctgggctgctctcagaacacagagaaggtccacagcctgccctggtgatacaaggcaggcaaggccccacattggggcttagcctgagagggctcttggcttcgtgcaggaatgaattcaagggccagtctgtgatgttaaacagtagattttcttgaagcagatgtgcacagcagcatcagaggctctgctcctcatggagtggggctaccttcaggcagtgtgcccagagcagcagatcagaggcaggtctgcactcacattcttacccagttttaattacatgtaaattaaaaagcagagtatgcagacatttctagaaaaaggatggtaagttttggatcatctgctcactgccatggaaaggggtggtaacctctggatgttgccatggcaatggtaaactcacatggcacactggtggatgtatcttagggaaagctacttccactccatccctgtcttaactagtcctcaatgtggtctgacatctgagacctatctccagaattgagtcccacctcctacctcactggggcacactttattatccagggccttaaagatgtgttgttggctagttccctcccctttatctgatcgggctcatcctaaaaggggcctcttcagaacctgctcttgggctccccttccccaggcctcaggtgtgtggccctcaagctgaggctgcccatggcaggcttctgcctggtcctgggctgatcttggtgcccgagcaaagcagttcctgcaaatggaggcctaaaggtccctcctcccatcagtctgtgtgtggagtttctaagttcctgcggagacccagctaaagctcagccaagggcctattacaaaatccccagggatctgaaacatctcagaaagtgttaaatttgacagacacagaggaggtgatatgatatgccaggctcatactacaatgaatgttcatattaaatcctcataacaagtctataagcacagcttctaaaatatctaccttctagattaaaaacaacaacaacaacaataaaatcataggcacaaatatacacactgtctgggccagggtcacagaactggtaaagacacctaggatttgaatgagcatctctttccaaagtctgtattctttctctctaccatgctgccacaaaacccacaagcttttagatgaattgcaatccccctccacctacccccaccaagatcccactattcagtgaggcagcaggcttcaagtgcagctcaatatggcccaattgctgaaagagtgttttgtaagaaatagttcaggaggaattcaatttcataaagacaggcttcttcataatcaatgacgtctgaataacatttttatctaaaagtatactctattctgctgtagttcctttctgataaaactgagtatgtcttccattccacgttgctttgacatctacctatttgctgagtgcctgacattattctaataactttactccaggcattgtatttttaaagttctccaatttctatttttaatcatttctctctctccacttagaatttccatctttttgtttattataagcatgtcttcctttacttcattgagcatacagccaatagtcactttaacatcctcacctgctgattccaatgtctgggtcctctctcttctgttgtcatcttcctggtgcttcatgtactgagtaattccgtattgtcttctggcattgtggtcagaatgctgtggagtgaattatcctctaagaacaatgctaatggttgtttattagcttgcttatttgttttagctggaaaataattcagctgggctcaaactggaaaccctctttttcagggaagagagcaaatgcagtcagctccctgatcctcagctgggtgcctggcgcctgctctgtgcctgtgtggctcaagggttggtcagggaagcgagcagagttcatgcaccccctctctggactccttttctcaggattctcactccctagcagctgtggtcctctcaactttgacctctggttcttcatgccagtaaagaggcaaattattgatcagggtgttaacttcccagagtggcacagaccagggcctgcccttagttgaaaccctgaaaaaattgggcagctcacagcaggtcattccaagtattgtctcttccagaactgaaaagctcctttccagacctttctgcaggcccccgctgaccacttaaacgtccccctcatttcagcctcattgctgccctgcaaggaggggaatgccttaaagatcatacccattttactgaaggggaaacatagctcagagaagagaagttatggcttcaagataacagctggcaaatgtcagccaggaatcagacctgggtcagctggactcccatgcccacattcttattctttcggctgtgaaaccatccttagctgctatcatagttgtgtttgttcagcagtggttttgaacaagctatcaaaagaagctgtgctctggaatgcaaagtgaagagaggtgctgagacatggggtggggggaggtgctcagaaggctctgaagggaacacaacccccctccatccttcgctcagaagggaacacagctgcagctcccctcttttagttctaactggagagcaaggcagagacccttcacagatgctgagagggctgggagggctagccaggccacctgtgacctttttagacttgcagaaagcaggaacagagaatattcttcagagtgcttggaggaagaatgcaaacctccttaactgataagtgttgaagaaacctggatactagagacccctgtgcttccctggccagaacgagcctcttccagcaccagaggggaaacgagtagtacctgccacaaacccagagcccagggagtaggccagacagggagccagagaagaagctgactgtactggtgctcatgacaagcttaggttaatttcccaagacacaatagagaggaggacatgcctgcattatatgtgggcaggatcaggatgagaaaccggcgacactgcagagagaaggggtcaactccctgtccatccctactcactccaaaaagattcctaggccttggtcaggaaatgatttgacttttctggaaaactcatgcaatctgactcttctaagagactgcatgaaccctgggttgtctgagtttgaagcccactccactgtctatcagctgtgctgccttggaaaaatcacttcacctcttaggacctctattgtgtcatctgtaaaatgtggatcataatagtccctaccttgcaggggaagggagaagttggaggatcaaatcagttaatatgtgtaacactctcagaacactgcctgaaatataagatgcactaaatatgtgctagcttctattattatttgtacttaatactatcactgctgctattaatatgcctgctactgctattactactactgttgttgttattattactactactattactactgcacctgttgctattataattattactgtcactactgctgctgttgctataattatcactactcctattactattgctggtattgctattactactactactactacaattattattcatgaggagaagctgagtggctgcaaatgctttcttaagctctgcatcaattcaaaatagacacagactcaaaaaacacagtggtacagttgtcagatttagcaaatacaaacacagaatgcccagttaaatttgaattttatataagtagtggttttttagcttatgcaataaactaaaaataagtaagctccaaactatcgtctcatacaatatttgggacttatttatcctagaacatgattgattgtttacctgaaatttaaatttaaccaagtatcctgtagtttgacaaccctacttgggaagtgggtggtgacttgttccttgaacaccattggccttgtgttctcgacacacacagacacacacacacacacacgctggcaggaggcttcgctctggactcatctttataagggcagcgttccgggctgggtttctagaatcagaacgtgggccagcattcgtgttcattggacggtaagggaagagggtggggatggggaacagagctgagccaggatgagccccactgcatgacgacagcatgaatgacccccagagtgggtctctccaggagacaggagaaaaggacccgctgtgggtccatgtcactcattgcagggagcaggggagtctttctgggaaggtggctctccttggtctgaaggatcatgatacctgcaagctggctcccccatctaccctagtaacatccaaaggcacccccagagctgcaaggagttcaagagccaggcaccacgccatgagtgccactcagtggctgtcagtgcaaatgcccagcaagaccttctgggacaggatgcagcagctgcagcctggaacctgctttctcctgtgaacagaggcagcctgagtggaggaaatagccctgcgctgcaaagactcgttggcagtgacagtcggtgccaggggctggctgcagacagtcgttccatgcagggatttggctgaggcaatgctgactcgggtaaaagggctttatgctgttcaagggctcttgacaaatcgcctgtatctttttagaattctgcaattcataagcgcaggttattttgacaaaacttagtgtcttggttgtcagattcaagagaaaaagcacaaaattaaggcttatcgaaatatgcagaaaaacacgttgcccaaggcctgaacatggccagtcatgagatgcctgtgacagatgagaaagcacctgtcatttcatgttgaatttttgaggaaggcttatttcaatgaattacatttttttaaaaaaaaagattgctatatcttgcagtaaaaaacactagactttacctgcggtaaaacactagactctaaagcttctccttcccacctgcacggtggcagtcagataatcagatgctcagagacaggttcccacagtcccacagcccacatctactcaatccacagccctcatggcaccctcctacccaggagcacctggagaatgtcctgatgctgtatggggctgagggaagtacctgcggaaacacagcacatttccccagaaggctgcagaggtctctgctactccgtggaatcctagaaccccagctctgcgaaagggaacgaggcctatgaactactcacaggagctaattagacatgcaggaatttacttaattaaatagttacgtattgaacagatgggctgttgtcagaggtattcgaaccagagcgactccatcttgaataggggctgggtaaaataaggctgagacctactgggctgcattctcagaaggttaaggggtcatggggtgagataggaggttgacacgtgaaacaggtcacaaaggctttgctgataaaacagcatgcagtaaagaagccagccaaatcccaccaaaaccaagatggtgacgaaaatgacctttgattgtcctcactgctcattacatgctaattataatgcgttggcatgctaaaagacactcccaccagcgccatgagagtttacagatgccatgcaatgtctgaaagttaccccatatggtctaaaaaggggaggaatcctcagttctgggattgcccaaccttttcccaggaaacccatgaataatccaccccttgtttagcatataattgagaaataaccataaaaacagccaaccagaagccctcagggctgttctgcttatggagtaggcattctttattcctttactctcctaataaacttgcttttactttacgctattgatttgccttgaattctttcttgagtgagatccaagaaccctctcttaggatctggatcaggacctccttccagtaacactatgggccaagcagggttttagacagcaagtctgtcgtaacaaaaagatctcggaaaatagagtgtggtttgtagctatcgttactgacagtcttctcttgaacacggtcacagagttctggaaacttaacacaaacagatatttttaagaaactgtgttatttctaacagttgtgttatttctaataactcgcaaataagtcataaacatatctcaaaagaaaagtatacatgggagaagtcaaatgtggactgggagggcctccattgtggccctttaaaacacagacaaggtgttgtagcacagcagtaagcttttctggaggcatttccttcaggctcaccacccattgtttggaaggaaaagtgagcacatttaccacccctggcagagatctaaggtcctgatttcagcccacagcacttcaagctaatcaagagactctggtatattgcactgtttatacatccaaagccacacctgttatagtgaagccctctgtattatcttagtaacttgtatttgcagaggaggaagagctttaaaataacagccattatcttgtgtatttggcatctccaaagtattgtccagatctgcacattgtaacaatgctaaaattaccaggaaagataggcatctccgtaatacctcagagttgctcagtgaggcaggcaaagcaaagaaaagggaaggtagtgcctcccctaagtccaggcagcctcacccatggcaggacagaggagaaggcaccctgcaggacagaagaaagagtatctttttgatggtgtaagtctactggaatgctaattgcacatgtggattagacactatttttaccacccccccccaaaaaaaaaacccaggttcttttgcttggcaagtaagaaatcaatctccttgagactgtaggtttgatcaacaggagttttattacttggcacaaataagcatgctgttgggagtactctccaaagccatgtctccctgagggaaagtgacaggaggacttcatggggagatggagagaagagaggacgcgtcatggcatgtggaggaggagcctcagtggtgcagacacagcgagtcatcacaccagcacataggttgcatgttatggtgatgaagctgtggctcatcccaggatggagacactagcatggtcatgaggaaagttcactcgggtttgtctataagctgctgaggtctactgagagctggttccaagcaataagacaactgcattccacacaaaatgcagggcagtaggctgtaaaacacgctgattgttcaaggcgattacattcctataatcactccagaccctctggagtggagaatcatctctgtcccataaaagacaaagaacttcacttgaatcctccaaagatggtgacaggtggatgtcaaagaaatgtaggcatggagattgtggggtttgctctggtaccgttggtgccagtaggaagggaaagaggggatgtcgagtttccatcccagggggcagcagtgagagaaggaacatgcctgggggcagtggagaccctcttcagacagacaccaatggccaaccaaagtcaggagcactggttctcaaaccgaagcaccagcagaaagagaccctctctttctgttcatgctgtcagtagactgaggtctgaaaaaaaattagagctgcctttgcaatgatttcatcaacagttgaacaagttaaatgcattgctttgtcctattcggttgtgtcaaagaattaaaaggtaaagatgaacctctaaatttaacattttatttgggaagaaagaattgcaagaccacatattgggtggttttcggtgtgtctaaagaacaaagagatggttggaggttttataacaaagagaagtgttatgtattgctctttgagaaagttcattggcactagtacagttccggtgaggtggcaacttttgattggtaagtaatggaatgggtataattggtcttagagttgcagcaggtcattttagcagctattagataaaactggtttcaggttacagcagccaggcttgcagaaaattatattcttggagcaatgttatgcatcctgagcacctttccctcttggcttcttggcggttttatttggatatgataagaatgacccgatttgtatgatcaactttcacagttgtttcttgtgtgtctttctggctctaagcatttctaacaccttagaatagcaaatatggaagaaaaaccagcaaaacatgatactctttagtcagcagaaagaagagaaaatgcagaatgctcatggacatctagctccagtgatgggggctgaagggagctgaagggagcaccagcaagtgaatgaggggtgaggggtgaggggtgggggaccgcaggcccctactccatctttctcagcctttctttttcattcaaaagaccactaggatggctaaatagtagaaaggagtattttattggtgaagccatcctcacagggttagcaagaattctggacagaaatagagttataattaagcattaatcagcctgcactttgacccacttccttgtaactgaaagtcatgcagcactgatactgaccactggcatccctattgttcctatgaataggatttctgatgttagaatcataaggcttttgtttaagaactgcctagggtgttttccagatcccagattcctactaaacacccaccagcatgaagacccccatagaagaacagaatcagcatgagaaacagtttcaccacttccccatcccatgacttcaccctgcacttttcaaccaaccaaccgtccccacacttcagcccactccaaaaccgttaacatcccttataccaaactcctcggtgtaaggttcttgtatcggttcaaacccccagagcacgccaacagacaacaggaggcagtgtggagcaatatgctgttctaatgagtgcctgcgtgcaggcaggctgaggcctaaaatggagtcagccccaagtgaggacggggcataggttttacagtctcctgtaaacaggaagtgtcctagtataatgtaactgctacattgtacacagacggcctctttctcgatcttcaggggtacctgtcttccggccagggtaggtgtcttctggccggctctcttcctgcttctgctgacttgctgatgcacgctgctgacacaagtggccttgcgccctgggactgggcctgagaagggaggagtcattcatctccttaagctttcaggccccagagagaattgtacacttggagagatggatttaaggttccttcccatcttctagatcagggtcctaggattcaatctccttctctttgtgaattggtgtcttggcggattgactagccctgtgcctcgttcatggatttatttcagttacactggcaatataagtttgcaaaccaggaagagactgtctccagcatatgacattggcgctctctctttgaagagggaaggggcagaatggattttatgtctcacagggcctgtatcacacgatagagttacatgtactcagtaggtttgggggaaagctatgcatgtggagaggggaggtgagcacacgcacaataggcacagatgtattaccatgcattccgtgctccctttggggtggggtttcagcataaaaataaggtagaatgtggctttttccatcaaaaagtgaactgtaggagacaaacacaatgtgtgcccagtctctgtaagctgctggaactgatttgacgtcttcagttgcttatcagaaaagaatgtttctaaggtcctctgtccaatcagagttgtggtggtctgggttgtaaatcggaggtaggaatttgcctgatagctcttattgttagggagtttagcaagggtgtgcttttcttgtagccctaggaatttaaggagttgctccaccagagaagaaaacttttctgttttcttaaccttaaagtccaccttagttgataaagggcatctattttggtctctccgatctcagtttcatgtgctacattgcagtatgtatgaaaagaaacaattgtctttatcatttcattttttttctgatttcaagtatagttcatgcttgttacagaatatttggggaaaagcagatctttttaaaagaaatactacccatcatctcactactaaaaaataactatgttagttactaaaattgttcttcctatatgtctatacgcacttttgaaaagtaaatttccacagaaaagttgtaacaatagttcaaagactttcatgtactcctttctcacattcacttgtttacattttccattatgtgattctcttcctgtctaaaacacttgacagtaagttatagacatcctgcaaacttactctctaaatatttcagctggcttttcttaagaacaaggacattctcttacataaagaaaattgtaaggttcttgtatcggttcgaatcccgagagcgtgccaacagacaacacgaggcgatgtggagcaacatgctgttttaatgagcgcctgggtgcaggcgggctgaggcctaaaatggcgtcagccccaagtgaggacaggacaaaggttttatagtctcctttaaacaggaagtgtcctagtctgacgtaattgctacgttgtacccggatggcctgtttctcaatcttcaggggtacgtgtcttctggccggctctcttcctgcttctgctatcttgctggcacaggctgctgatgcaagtggtcttgcaccttgggactgggcctgagaagggaggagttactcatccctttaagctatcaggccccagggagaatcttacaaaaatcaagaaatttcacattgaacagtaccagtatgaaatgcacaggccacatttgaatgctgccaattgtcccaactagggtcttcctagaccctctccctctcctcggcacctgtcacttgacccgcatgtttttgaagagtagagatcatttatttagtagaacattcctcagcttgggtttcctgatgtatcctaaggaacagattcaggcatgcatctggggcagtgatgctgcaaacaggactggtgctcttgtcagggcatcacatccgctattacgtgatgcaggttcatcccagtgttgctgatttcagctttcatcacttggtttaaggtgttgctcaccaggtctctccaccagaactgttactatttttccctttgatatacctatttttaaaagtgaaattcccagtcattttatcttacattgaccgagaatgttactatgactttagaaaacagctctgtcccataaaagacaaagaacttcacttgaatcctccaaagatggtgacaggtggatgtcaaagaaatgtaggcatggagattgtggggtttgctctggtaccgttggtgccagtaggaagggaaagaggggatgtcgagtttccatcccagggggcagcagtgagagaaggaacatgcctggggcagtggagaccctcttcagacagacaccaatggccaaccaaagtcaggagcactggttctcaaaccgaagcactagcagaatcctctggaaggcttgctagatgcagattcctgtgccccaagagtatataattcagagcatggagggtagagcccagaatgtgcatttctaggcagactcaagagaatgctgaggctcctggtctaaagatcccaatttgacaaccagaggcctaaaagaacaacacttgggccattcttgggcttctctgaaagatgagtgtcaaatcagtcactcagcaaatatttatttttagcatgaattttgttactaaaacagaagagttgaaacctgctggtgtaattgcatctaacgctatgaaaagacatctccaagagctactccagattcggtctttgaagatgattgccaaccccttgccatcctgtagccaagcttccaggggggttgcagagagtgcgtacgtataaaccttaagcacaccttcttttactctgaacatggctccatccacacttttccagccatattgaactgtgtgaacagtgttaacagccaaagattctccagtccaggcacccacccagaatccaactcttattgccaagtgagactactgagggccagaacaggcaggagaggggaggtcaagagaagcaaaggcaaggggccctctgctccagcctcacagaaaaaaaaatgagtccttagattgtcccccatccacccatgcacatggttccatcctgcccaccttctctgatctagaggagaaggctgagtaattatccgaattctctcccatcgtgaagtctgtcccaggccccaagctgaaggaggtttgtcttccctgctccctgagtcactgacccaggctcaggtctggctgtcatcgcattgggagagctctttgcttacctgcctgtctctcctcccacagcagagtgagttctcaagagtaaagggcaggatttcgttttcacctatccctcaaaatgctttatccaatgtctggagcttacaaaaacctagatggatgaatgaattaataaataaatgaacaggtagccaaggactccagccctagaaagccagtgggattacaaggcagaaatcccctgtctcaggagcctaggtgccagcccaggagcagcacggcaggagagagagaaaagccacatgtcaggggtgtgggctggggactcaagttaaaggacaaagcaagaagtcagtcctaacctgtgttaggaagaaggcaggcccagtgctcagtgtgtgctcagcttgaagacaatcagtcccagagctgaggaaggggttcactagtgggcaggggttatgggatgtataactcttcagttatgggaactgcagggcagggagccagatggctcaacctaacctcaagagcaaaggaaataggtcccatttcccacaccccaaacttccccattaaatactaaactatacagactggctctaaccaagttctcacagttgcccacttcccatactctgctttatcttgacaaaacttgggtcagacttttcttttctatggctcttttgtataaaagaataattaaaatgcaaataaatccatgaagtatcatgcaggatgaaaactcattcaacatgcagcatcagttcacaagatcagaatctcttttttctgagaggtcaagattgaaaaactggagaaatttcttagaggaagatgagaagagagagaggccatgtagacagtcctggatggccagttccgactcctgccttcccattcaaaacagcacttggagaagcttcaggtccttggaggcactgttgagactggcttcgttttctagaaagtcacaaatttctagaaaatgggagaaagttacaagcctttctcccattgatctttcctcactgggctgcccattctccagctgctggttttgcaattgctgttccatttttctgagtagaatttacattaacagcacatttcagtgacagtactaatgattctggcacttcctaaagggcataaactctgtgagccattagcaataaaaggagctgtcaagcatcactctggatacactcagccggtggcataatccacttcgctgaatattcagaatatatagacatatataattaaatgactttattagggtgactgttttctgctgaagttatttgagtcatgcttgatgacttttttcaatataagtgatttataagatttatagagagactactgctactaacaatgatgaaaccagttatgcaatccatccttgttaaatgaacttttaccaaggctgtctccctgtccttaccctacaggactctacccactcctgcccatccacagagggtgggcaaagtgtgttaaatggcactgacccctgatgacactaattgaaccaggcctggatactggacccaagctggatccatcagattcccttccctcgtcatctgaacttggaccactgaatataatttattcagaaagtggtggatgaccaagaggtaacacttgaggttggggtcagctcagagccaaatgcaaatatagcaagcagctttgctgagaaaaaaaatagggtacactgaaaaagcatggtagaggtgagtgagactgagtggtttcccagtgttgggagacaattctccatggcctttccatttctgcacatcttgtgagctaagactctgacagcatctcctctgaactgtcctttcaaagatgtttgtccagcaagagccttaggaaacagagatactgtctccttctacagagggaagattagtattcagatcaggatgataaagacaatatctttctctgggacaaggtttgggaaagtttgctatcagccccttgtaagattaagtcttcttaaatgcaaggttcctcaattctgtgcagtgtccacgtggacccacccacataccatgagctgtgggaatgggaagaggggtaaggggaactggtgcccacactgactgctgggccctaagtaatgaagccctaggtgtctaaccgaggagtgccctgtcttctgctagcatctgtgaaattgtgggaggttacctggttcgttctcaagtagagtaaatcttcagcccttcatagtccttgacaaagcgttgagaaattgactagtgagtgactcaaactatgcagtaaataatagtagagagcatggtgtactaacaaaacaaaaacccatttctaaactgagaagtttgtaatccatccagaaccattgttataatgagctcttttcgcttccaaatagatttgcaagaacttgtattgagtctatttttaaaaatatgcattatactctgaacactgaaaaggcagagttttctaagtattgattcctgtgtcattcaattgtgagagcatttgagtttcaaaaatgttttcaaatgctcctgtaattttccttgtggggtggtgggaggagtgaaagtttactttcactgttggtaaaatgtctaggaacagaaggtctgaattaatagcctagttcctgcaatagcaatgattataagggtaagtttgagaacataaaaggttcaggatcctaggctaagcatgatacgtatgttaaatgagtaaactgttttgaacagagttgagcacatagtaagtgcagcataaatatttcttattcttatcattaccttatctcattcaatgaaatacaaactcttgtgttcatctctcagagatgagaaaatcaaggcttaaagaggtcagtaatttgcccaaggacagtggttagagtatttttggctgcaagcaatagaaaatgcaatgaaacactaatgttaattgttttacgtagaaagaaattcagattggctgccttatcagctctcactatgatcaagtagcctggttcctttctgctgttttccttgtcatcttcagtggatcagctatcacactggacaagcttctcacctcatagtcacagggtggctgcaagagcccaacctttcctagaagttgcctctgcagatttccccgcatgtctcatcagtcatggttgggccacgtgtccacccctgaagtgatcccaggttccagagaggaaaccaatgttgagcacacaaatacatttcaagtgctgtcctacacaaaatcagggatctgcccacgaggaagaagaggcggtggagcttggaaggtatgcaaccatggctgagactgtaagagccacggtggaactccaggttctgaacctcaaaagttccactttccattgtgatgaaagcatctcaggactgcactgcccagcttggcagccacagcctcacatgaccactgagcacttgaaatgtagttaatatgctaagaaagcccatttaaatttttattttcaacttacttaaattcaaagagccacaggggtctagtggctcctgtattgacagcacagggccaccttgttagtggcatcatttataaccctgggcagcattgctataggaatagccatatcctgtaggtctataatgctgtagaaatggaatgtgtggtgcgaatgaaatttaaaatttaagtagccacggtgaaaaaaaaagagaaacaagtaaaattcatttcataatatgctttatctctatttccaaaatattatcatctcaacatgtaagaaatataagaagtattcatgagatattttacattcctttgttcatcataagtgtttgagatcccatgtgtgtctgacacagcacctgactttgaactcaccacatttcgagtgccccatagcccatgtggccatggtttagagatttcagaaagcattcatggaaaattctctttcctgatcctcattcactatcctgggaagtggccagataaggaagcaaggcccagaagggcccagccagtggctctcagactccagagtcatcgagtccctcactcgagggcaggttaactcacagatggctggcccccaccctctgcatttgccatccagcaggtctgggtgggtaccaggatgcggattcgtaacaggagaggctgatgctgccagtctgggtccacattttgagaagcattcctccaagggtcccacccacgctcataccccagtaagtagatggctcagaattgaaatccttgctttccatcttacatctcattctctttatatgcacaaccatgaagccaggttgctaagacagtctgaaaacaactaccaaagaacagaggtgctgctcatggttaccccagtgtgctgcagcccctgtcctccagacagtgacagcagagtggacctaattttgatactttgtaaacattggaccaatgtgacctatcctagtcccgtgcctttctctggctgacttttcttttatctcatctgattgtgggatcaatttatttaaaggaaaccatttaatgaaatcttaaggaagccctcacctttatatttggtttaacagttgagtttttggggtacagctgaggtctctatcattgcaatgtctagggtgtccctgaagttcaggtgggaatctgaagacactttcctgatccacgcaggcgacttcagacaatgtcctacacttagccacgggtaaatcatgcttttaatatgctcaatggcagaactggtcaaagccactctgagctgctgagagcacttcagattattttccacaccagcaggcgatagaagtggcattcagggactgctgtcattgctgctgagatccaagactcctcttggtgcactgtgatttgcagggaaagctgtgtctctctgacttgcaggccagaggttctgaagattgcttgaggttgcaagtacctccaagcttgagcagcagttttgaagtgtggagatgggaggtgagttattcacatctctaacaaaggagctgctgcttctggcttcaggaggggctgagaggcccctgattcactatctcatcactgggctggaagctccacagggatcagttaggcctgtgggccatgctttcagcacttggaggagaagatcccttagactcagcctttggctccatgccactcttgacaatgtacagggaagccacttggacctgatgctggagtttaatcaacagacaaggaagaggccccagtgtgtactgggcaaaagaacgggacgggtgtgctgaaaagcgtctcataaacagactttgttttcctgtgttttaactcagcgtgaaagtttctctaggtctcctctcctgggggagaaaggtagcggctggtttcctgttccattgcttctttagtatcctgagagagaacagccatgggcacccagctgccccagcctcttcctgtcccagggccccgaggctgcccttcagcggtctccagcttcctgctcctgtaagcaggggcctctctttttggctttcctgacatttctcctgacctcttctgctagccctcctgaacgcacagtaatatctgtacattgcagttggtccccaggctgctgcctctctgtctctccatctaatgttgcatctgtgcactttagaagtacccgggagccttcaaaatatttggatgcctggacaccactccagataattcagtcagagtctctgaagacagggcccaggcatccctgtgtgaggccttcaggtaattccagcatacagcctgtattggaaagctctgtattgaggatgaggccctcatgctgcagagggggcctagagcacagggaagtaagttcctggaagcactagctgtttatcacatagggctaataaccaatggggacagtcgtgcatgcttctcttcttacatgctagcttactatgcttggaggcatacacatgtgtatggggagaggagggcagaatcggggagcattaggagaaaaacctaaagtaggcacaggaaagattccaggggctcacacatgaggcaggacaagaagaaatactttctcaggaaagggaaggggccgagtgttcaatgggcagagaggacagcagaagagaggagaccaggaagacaagatagcccccagcacttccacactaagccctggaaaggctatctgcagaggagccacctaagggtcttcccaagaccagggttaaagggaaaagcccctaaactcctcttccctcccaaatctgaggttgctcttgttcccttccaccaaaggatggcaccaagtagaatgacaaaggtgccatctccttcctctttctcagggaagggtctctctcttaaggacaaagatgtgaaaggtctctctcttagggacaaaaaggaaaggacagaccaacctacagagtggaggagtgctagaccaaatcctcccaatacatctatttgagtagcagagactggagacagtggttgaggtcaactatggggctgcactggtgctgatcatgcccgtgctcccatcccacacctggataaacagcagtgggcagcttcccccaccccccagtcttagaaaggcctcctccagttgcaacaggactccctcctccccatcgctgtcccagccacccagcggaaagctgagaccccaccccccaggtggccaattttagacccactaaaggcctttctgggctgtactgggggctaaagggggccaccatcccacagagaaggggccaaagacagccaggatcctaaaagtcagagctactttaagaataactttcccaggccaatccccagttcaggaacgttcctgtgccctgtgccagctagagggactagggctggagccggcggctgctcctgggtgtccagtccaggagccagtgaactcactatctctggagtttagcagaagaagggtaattccaggccggaacccctttctttcccgacctctcgaccacagtcctccccaggcacattttagtggccagggatggagacccgcggataatgactgaaccaggtcacagggtgaaggttctgagatgtccggctcccgtagcttctgccagttcccgagggagctagcacaggcttggccttctttggtggcatctctgcctccacctgtccgtctccattccttgtgcccatagcacctcagctgctcggacacagaagttaaaaggtccggcatctgcacttgtccagagtgggttggggagcagagaaaggagtggtgagctgtggggaaaactggacatcctgacagacctgaaattcaccaagccgccagtggaagcctcaggttccgcctctataaaagggactcagccatgtgcaaggatgggtcgtcgcgaggattaaagggcagggtgaggggatgtcaagtgcaaggcaagtggtccaagcttccaggtggtccctgaccagttccgggcacatctttacccaaagggaggactccgggacccccagccccgccgccgcagaccccctgtagcaaagcagggaactggacctcaaagggctgctggggaagacgggatctgaatagaggtctgaaggaaagaagccaggcgggggaccccgggagggccggacggggctgggggtgctgttgacactggagccggactggagacctgggaacctggggcagagtcggcagcggggagggggcgaccgaggtgggaaaacggggcggggccggagacgactccagggctgggtgaggcgctgacccccaggagctggggtgccgaggggcgcgggccacagcggtgcgagccagtcgggcgcccgcgcggtggggcgcgcggcgcggggattggcgggcgctccccggtgcccgcagctcttcagcgtagccgggaagagccgcgcgtctgcgcgccagcccccgccctgggcccgccgcccgagctctctggcgcagcgctagctccgccgcgctcagctgccctgcgccggcacccctggtcatgagcgccccctcgacgctgccccccgggggcgaggaagggctggggacggcctggccctctgcagccaatgccagtagcgctccggcggaggcggaggaggcggtggcggggcccggggacgcgcgggcggcgggcatggtcgctatccagtgcatctacgcgctggtgtgcctggtggggctggtgggcaacgccctggtcatcttcgtgatccttcgctacgccaagatgaagacggctaccaacatctacctgctcaacctggccgtagccgacgagctcttcatgctgagcgtgcccttcgtggcctcgtcggccgccctgcgccactggcccttcggctccgtgctgtgccgcgcggtgctcagcgtcgacggcctcaacatgttcaccagcgtcttctgtctcaccgtgctcagcgtggaccgctacgtggccgtggtgcaccctctgcgcgcggcgacctaccggcggcccagcgtggccaagctcatcaacctgggcgtgtggctggcatccctgttggtcactctccccatcgccatcttcgcagacaccagaccggctcgcggcggccaggccgtggcctgcaacctgcagtggccacacccggcctggtcggcagtcttcgtggtctacactttcctgctgggcttcctgctgcccgtgctggccattggcctgtgctacctgctcatcgtgggcaagatgcgcgccgtggccctgcgcgctggctggcagcagcgcaggcgctcggagaagaaaatcaccaggctggtgctgatggtcgtggtcgtctttgtgctctgctggatgcctttctacgtggtgcagctgctgaacctcttcgtgaccagccttgatgccaccgtcaaccacgtgtcccttatccttagctatgccaacagctgcgccaaccccattctctatggcttcctctccgacaacttccgccgattcttccagcgggttctctgcctgcgctgctgcctcctggaaggtgctggaggtgctgaggaggagcccctggactactatgccactgctctcaagagcaaaggtggggcagggtgcatgtgccccccactcccctgccagcaggaagccctgcaaccagaacccggccgcaagcgcatccccctcaccaggaccaccaccttctgaggagcccttcccctacccaccctgcgtggccacctcccaaggggtgggcaccattcctacagccccgaagactgcatctcctgaatgctcacctaagctccaccacctgttccttccagcagcccatgtacctgccggagagtgtcagaactcttctgctgctctcctctcccctgcactctggctttcaaaaggatgcttccatatgggtaggactcctctggaaactgggctaggatattaatcattcctgaacctctggctgttcttcaagggctgggaagcaggaggtggtgagaaatgaatggtccctgtgtgtgactccttacagccactgcttgggagaggactcaagaaggtggagggaggtagcacccttcctctctgcagacgctctgccttgtggtgggagcacagcttgtacaggagagaggaggaaggaagatgcccccaggcacctgccctttatgtctcttcctgagctcttgttaagtgagacttatgttaacagcctggggcacttacttccctccccactcacccccggcctgggaataacatctgcttgctgtcacaggtgtctccctgagttgccctgagctgggagcagtcttcctgtgagtagaaaaggtttggagagacatgacatggggtttattgcaaggcataaaaccaggtcagtaataacaaagcagatgataaaaacttcatctagctcctatgatgtaattttttttccctgatcctttgatgtgggaacatgagaactcattaaggcagcaatttatactgtggtggtgagtgagagaggagccatgggcgggaaaagctgaccagagagcagcgagggatgggaaccagcccaggttttggatagaggaagcagcttcatcaccaccccctattttagaatgtcatctttcagtaaaacatcagccacattagatattaacatgtaagttgaacacaataaaaggccgtatctttgttgcctgatgtgttaaccaaaggataaattatctttcccaaagggaaagagcttaagaggagctctaattctgctttctgataaaagcaggggaggggacaaaggagaacttggaacacttatgttagcatctggtgtaacaacataggaacatgtatgaagtttgggggaccccacctggcttagcattcagagactacctctgggtttaaccggcctgattctggatgatcattctggtggtatggggaagatggtgtggggagggggagagacagccaaaggtcaacaccctatgcccttcagagtggtcagcctcacagaccactctgagagaatgggtagccatgtctgtactacatactggagacatgactgtggaatggaagtttcaaaactaagtcagagaaccctctgatcctgcaaacacacatgcacacacacagagacatcaaccatctctaatttgttggcacccaccagggataccttgggcatctgaagtcagtctccatgtctgtgggtctcgtgtaaccataactacttggagttttttaaaactgcattatttctttgttcctcagtgtctgacaatgcctgccaggatgggcactgatgaatatggttgaacggaactccaaggaccacccaggttgatagtagtgaggtgaggggttcacagcactggcagtggtccccagggcttcttcccagcttgtacgtggggttgggggtcctttctttagtctctcagtgatcagactgggcaaactctctgataagcaagacagggcacctaccaggagtcttggcaacactagtgtgtggctgcccagattagcatggaataagacacattctatttagaaatgtcagcctttttaacttagttgatgaaggttgaaggagaggcagcttcaggtgatggaaagaaaagtctctgagaggcaggacacctcagcctcagctaccccgtgagcagtgatttaacctctctaagcctcagtttcccacttggaatatgtgccaagggaggttcgagttttgagctcttcccagctgtaaactctgcattggcagagacaccgtggagacacgcgaatcaaatggtgggagggcaggagatagcacgcttctctgcttagtcctccttccatcaccactggaaaatgagcgtgaacactgcccttgaccctgcagtcataagtcatgcaggtggtggcggggtgggggtgtagggtgagcctacccgctgctctcttctttagcttcagggccttttcatttcccggcagcaacgaggtgcactgagcacttgtcggggctgtgtttggagcccatcaacagtgctaccagctttagttccatcaaccccaggcttttgtaacaactggttgcatgaaaccctcccttgtagtttgtgtacagaagactgcaatgaattgaagtcatgagacatacagccaggatcctgaaagccaccaacatatgtcacctgcctgggaggcttgcttcgatggtcatcttgttctgcctgctaagaccaggagtcacagctgttgacatcatggtgaataaaaacattttctgccacaggtagaaacagcctttgctcatccctccatctgtcagagatcttgctttttcttttacaattgtctttaatgtactgttccatggcaagccaggtgttccattttcccagatggtcagggaagatggtatttagacatgacaggctgtcactcagcaggatacttgcccagtttgtcagctctgatctgtgagcaaagatgcatatgagtttcacactcatctgtgaagtattggcttcactttcattaaagtcatcatagctggcattccttagatgctagaggtggatgcaaaggatcaactaaatatagcacgttttggcggcactgcctcagaaaccagacatgaatcctagcaaatgtgggcattgacactcttctctgagaggttggaggtagtgaattacccccatctcccacattctcattccataagtagatgacagcatagcctcagattccttaaggacaaatgttagaatcctagggctgtgttttctgagacagctccaccatggtgtacaccatcagccagcagcacaccctggaaactgtcttgctgactagcatgcatgggggtatacatgtggacagttcgctgagtgcttctctcgggtggtgcaacaggtttccagacaaaacgatgagtctacaaaggcagcttctgccttcatggagcttggaggttagtggcaaaagacaggcattaatcaaataagcacagaaatgagagtacagttctaaacctaaataagcactgtgcaggaaaggaatgtactttctaagagatgatgataaaagaagttgcccatgactcagagcaggctttccccaggaaagtggctggagatgacctcctctgaagcgtacctaggcattaactaggaaaggaaggggcggggcacaaggtgttcctgtaagctctaagcagagggaacagcatgtgcaaagagcttgcagtgggaggcactgaagggctcaatgtgaccaaaacacagaccacaggggcgtgtgaggcactggcaggcacatgagcaggagcctaatgccttctatgccacctcaaggatgagggctgtgtcctaagagccaggggtcagtggtggcaggctctaatgaggggcttgggtctgcctagtaagagaagcctatcaaaagctttggggtccttgtgaaattgaggcttaacatgcctctgcttttcagggaggggttggcaggatgatcatgtccttctttccaactttcatcaactttatatgaactgaaaggcagggacctcaatcctgtgaaggaagggactttagtgcctaacagtgggggcaccttctgaaatgggggagaacttatgtaaaaaaatgcctagaatgggagtattgactttctacaaagaaaaacatgtggcttcctattgtcaaaagacaccatgagcatccacctgccgtaacatagcacttgaaatgactggatttctggggctctgcctaaagagtggggctgccaaaggtcagcactcacccagtgtgaacgtgtcgtagatggggagaaagaacaaattgagaggcacacaaaccaggactgagttccggctctcccacttccagcccacagcggcccagggaaggctgcatgactgtgtggagagggcagagcaacagtatccacctgcaggtgcacagtgacacacaaaggccatgttcctggcccaggggaggaaggtttaccattcaaatggtgactacttcatgatatagaaggaggaagagggagttggtacacagttgggtgtcttttttttccatttttttttttaatcaggctttcattagtgttctgaagaggctgtaatttctttttaatctatttttaattggagtataatttacatatggtagagtgttctctttctagttgtacagttctatgaattttgacatgcaaatttttacattttacattttacaattttacattttacattggggcaactaactgttgccccaatcaagatcgggactgttttggtcaccatctacttccctcttagtggctgtgatttgtggccaaggaggaaggacacagacagcatggggaggacctgaggaggtacagaattggagatggtgctatccccaaatccatggaggccacctggttataccatttcccgagttcatccccccagactaggagacctcaaccaatttacataggaagctatagccctcttgaccttatggatctgaaaagaagtatcctggaatctagacaccacctggagaaactagagggttgagtatgtccctgggcaagctgctaattccataatgacttcgtgatcctttactccaagcactggagagagggtgtggattccactccaagctcccttccgccaaacagagcagagtgctcctcaagatccagccgcatcccaaaagcaccatttccgtttgtcacgggcctccaggcagcttgctgttgagtttgctcatgtttatcatggccgtatcctgtgctgtggagagtcatagacaaattaaacagtgaaactgggacttgccccatgcccttttcagactttccattctcctggcactacccttgggtttctgcatgctacctttttggaggagggggaaaatacatgaagaaagactggagtcaaaccctggcaaaggctcgctgaaaatggggatttgggattatatgagcatttcagaacagatttattaaaagagggggacaatgaacaaggcgtaggatctccaaagagtctgtggaaggtgggatccatgttcccaaaggatttaaatcgaaacaaggcagtaggcagtgggaaaaggggaggaattagggagaatgtggaaaagcccctctcctctttgccaagtagaacaaagctttgctggacaacagcggggtaacttagcatttaggtacggcattagcaagaagtcagaaagaagatttgagatgggcacagaggtgctaacctctaaccaaaagcacagaggttatattgccaggcgttgaatatgcagaagataagtgggttttgtcttaggataatatcggtattaaaatggctattttaagagaagatttccttcaggcagagatccaaggaaatatctggcctgtggcccaggtggcataattgtcacagaccccagctttgactcttggtgtttctcattggatccctgaaaccctctgctctctgctccccctctccagtgggcgtaaccttgagttaacccatccccagggttcttttgtctttcacaatcacactttcaaaacaccctgaaaaggatttcgattctattagcatctgatgttaaaacaatatttagcttcccttgtgagaagaaatcagttgtttgcctacatctgaacctgctaaccaaaaaaaaaaaaaatgaggaagggaacactcaaaacaaaaagagatatcactgaacccagggcattcattctggaaaagaaagaaagaaagaactgggcattgtctgcattgttttatgaagaaatgcttctaaagctcaggagatgtattttgggtacccccactcagctataaccatgaagaaaatgtgttttcatgtattatttgcaacctcagttttccttgaatagatgatataataaggaatcgcattcaacagagaatagcaagtgactccagaaggtaggaggtgggggatcttctgtcccctggccccatccacaaccataatgtctctcaaaggaatgtcacctacaggaacttccctccgtacctcctgctggctctgttggggccagagctatgtttctctttctcctctgggccctgagaaatggagaagggcactctggagcatgttcttcctcctccgagcctccttgggagaacagcggagggagtctctgtcccctgtacttgactaagccttgtgagaagggaaaataagctgaagccttcgaagctggattttagagtgaccgagtgttggagctcacttctcacctggcacaaaaatcttcctgtttaagctatgatatagatgcctgcaaatccaacattacagttcctctagcattgacaacattgctccaagcaactgcatcttcccttgatggaacagtatccactttgtgcaaccttgagtttgcccgtaagacactcatgattccaacacagcttttttctgtactcatttatgcatctaccagttcactggcacacaagtaaacagttattgggtatctaccatgggccagaaactgagcttatctaatcttcctggaaaccttgtgaggcggcactgcttgaacccgtcttacagcctttgaagggtcatgtggtgcccgtggccatgtgaccagcaggtttcaggctggggtcacacccaggtgtgtatgctgttcacaccacatatcagccctgcggggtgcttacagcggaaattgtgcaggttcctgcccaagagggacatgtaaatacatctagaagtagttgttatcttcccaaacaatgcagtacataaattgaatcccagtgcactctcatcaaaactccttgagtgcccccacttgcacccagaacatttttcaatgtcactctttcagtctttttttcagtgtctttgacctacagcccctacagtcatctcccactgcttgtatctctctttccacctcttcagctgccttgcagcccacctcaccttgttcactatgcccagtccgctccaccagggctcttcccagtacagggcctttgcaggtgtgatccttcccacctggactgcttcccctccagtttgcatttgacaaacccctccttccccttcaggtctggtgttaagtgtcagcttgtccaggaagctccctctagtcctccactctaaatcctgccttcctcgtgcgccttttcagagtgtgctgtgcttttcttcccctgcacttatcactgtttctaagttaagtacaatttgggggtgatcagttgttttgcatctttctcccctgccagagtctaacttatatggtagggacttgtcattgtgcctatcactatgaaaggcacagagtaaatgctcagtaaataattgctgaactaatctaagaaataggtgagaactggaaaaaaaaaataacaaagtcatttgacttaaaaaaatgcattctgtttactttaaaacagcaggctaggaaaaacaaacaaacaaacaaacaaacaaacttgaatgctggcttatccagaaataccaccttggctttcttgccccggacttttgtgctatgaaatttcaccagcaactggtccctgggagtctccctcagacctggatgtccaatgatgtgaacagaaagcagagatcacacaggttgacccatggctctggtttcacaaggtctatcctgattttaaattctcagggatagtttttaaagctaactgatttgtttatgtggtcctggtatctttccctgagaggcactatggctatttagcgttttgagaatctcaagttcagatgagacctataaacagaactgctgatcccccaggcagcaggaagtgaggaggacagggaagctcagggccccgcacaactaatgtcctggggcccaagtgctgcatgaagggtttttgcctctaggttttgaaagtgtgttttggtcttccagtgttccttaagaaaatgcccctcttctggaataagaagaaatcctaacgcaatgaggccctacaagtcagtttgacagtgactgggagcagactcttttgacaaacagaaggctgggtaacagggggcgaactataaggtgtcactgtctcctctggtctcccagccccatttatctgcacctgtcctgcccccatttgtgtagctcttccttcacaaagacttagtctgctacttagggggagcatggctcagcttgttatctccatagggcactgtgcatggagcttccccagcacacacacacacacactaaagccattacttcttctgcgatggatgtcaaaatctccaacccggtcttcacaataatcagtcaaactaaaactcatgagttcagcattatccagacatataaagcatctgaatatttgcctggactctacttgcttttaatttcttctttaaaaaatctttccgagccctgcatattgcattcagccagccctaccaccttagaaaagtgagcccaagaaacgtgtgcattgaaaagatgatgttgttaatctccaaaagagatgagaatgatttcatactggatgagacgtttagaaatgaatatttgaatgagagccacaaactgagacccttcatgactacagtgaatttggatatctcgcagaggagataatgccaaaccatacaccggacacacagctgggattcgccagatgccccaggaagggtttatttaattcattccaacaaatgatcctataatgcatttatgcatttaaaagcacagagacacaagtcctcatatatgaagttgttatggttacagaaagaaaataaatatttgtgcacacagagatagcatgaaatcattctacagtgaaaataatagcctctggaaaaagctttgaaaatcagagatggtgccaccaccagacaacacaagtgctggggtacagggcagccctccatgcatctcatagcatttgcatggtttgtgagccccatttaatgacataaaatgagggcactgagggaggaaaagtgaacagacacacaacccgagagcacattgttatttgtttattttgtacaagtgatgtcataagcaaggattttgcctgtgttctagattatctccaataaataaataactatgtacaaatattttgagtttacaaaatagaagaggaaaacctttgtcttacaaaagttacatttctatgatacatttatttccatacactgaagcaggatttcattcctagcttagctgaaccaaagaccttgcagaccctgtgtggcagtgtctagagctgtgtacctagccttttctaccaaagagcaaagctacacaaagaaaattcctcagtttcttgaaaataagggcctgacttggcctgctacttataactgatctatatttcatgtattccagaaaattggaagcagtctggaatggttgtcctcaaattactgagcagacacaccccctgcagatcttgttaaatatagattctcatgaactggatggggtggagcctaggattctgcatttctaaccagctcccatgggcagggcagcttccaattcttgttcaggggccacattccaaaaggcctctctgaaatggtagaaattctctgaggacctgattaaggctaggccctaattgggcatcctccaggatccattcccaagctcccaattccacaagaccagtagagctggttttattttggtctaccagtgacaaggaacagtgacagtcaattgctaattggcatgaatcatgcagtttgaagctttcttgaactgtctcctgggaggtgtttgtctcttctctcaatctagagcaaccttctgaacattttcaacactgtcaaaaataagtaataataacaaaaaaggaaattgcataagaagattagcaacaattaccatttttcagtacaaatcaaaacagcaacaaaattcaggctcactgtttaaaagtaaagataaatacctctttgggtgtaatttctatgacagtccagcaacatcaatttaataccttttacatctcaacctttgtttaaaattattttgctctgggaatctgaaatttcaggataaattagcaaatctggtgaaaaagcaaatggccatttttatttttagtgtttttgtttctgtttcatgtaggggttctgtctgagcagacagctaagagcaaaagaagtagggtcaggcacaggtagggtgactcaggtgagttggcccagttcctgggaggagaaaactaggaagaatggggaataagtggggcttgcttcataaatgtgagagggctaggaaaaaaaaattcaccaagatagtttacctgtcacatgacaagtgggagtttgtagagagagagagaccggagagctgtgcaaagtggatactggagacatacaggtaagaacaaaggaaacaaacaaaaacctaaatacttaaaaaaaataaatattttagtcatccctagcccacgaggtcaaggtctgcccagaaggctgccgaccaataacgctcaccctcctgcgcccggtagtgaggacctgggacaaatcgcagtctgtgtcttcgttacaaaattgccatcattgcccagtggtccagtgacgtcacggaagaggccgaggctcattctcctccctctaatcaccccctcgccagttagccatggaatagaagaaaacagcttggggggtgcggggagggtcttctccagctgtaatgccagctaaggtgctttggtagcaaagctgggggtgaggaggcacaggctcctggacggagccaggctcctggacggaggccgctcagagtctctgcggcgtccgctcggtccgcacgtgctgcagcactacctccttggaaggggccgcgcacttgtactccatcttggccctggcggcgccctgcttcttgcgcaggtggcagaggagcgccaaaagcgccaccaccaggcacaggctcgcgatggagatgcctatgagcaagcccgaatgcacgagccccacggccggaggagtcaaggtggagccgggcgtcgggctgggcgggggctcgccagagccgctgtcgccaccgtccaccttgccggagtcacagtcggtgccaatgtggcgggcaagggccgagtcgggcccgcagatgcactcgaaggtaccggggaggttgtggcacaccccggagcagaagccgccgttttcgcactcgtcgatgtccgtgcagatgaaaccgtcgtccaggatgtagccttcagggcactcacagctagcctgggtgttggggtcgcagtcggctggacaggcagtctggttgcaaaacatctggcacctgtgcggctcgtggggaatgggcgcgaagccctcggcgcagacgcagaggtagctagtttggttcaggggctggcactggtactcgcagttggctctgaagcacgggtccacgggctccacacactcgccgtccaccaggtcgtagttagggtagcagtggcactcgaagccaccctgtgtgttgacacagcgctgcggacacggactgggctccagtatgcagtcatccacgtcctcgcaccggtgttggtcggccgccagccggtagccggtctcgcacatgcacgagtaggagcccggctggtcggggttgggaacgcagaagtgctcgcagaggtcgttgcaggactgcgtcgcggatgcggtgcaggagcgcccgtctgcctgcagggcggcgccggctgggcactggcagcggggagccccagggatcgcattgcacgcgtgctcgcagccgccgttctccacgctgcagtcccaagcgcccggcgcctccctggcccagtgcccctggaccgctccgggcggcgcggtgcacattagctgtaagccgaggggagccaccgcggcggagctgcccaccggcagcgcctggaagtccgctccgcgggccgcgaacggggtgccgtaggtgatcgagacggcggcagccgcggcgccgggctccacagccagtggcctgcaggtggctgggaagtggaactcgcagaggaagccatcggccttcacttcgcactgctgctcctcccagatcggctcgctgggcacagtggcctcagcagcggagacagcgacgcacaacgggccgcagaggggagccccattgaggtcgagccgtgcccacctgctatagctggtgttgttgtctcccgtaacccactggaagccgcgcaggggcccgaggcgcttggggtcgccgcagccgggtggcagctgcaggccgatccagaggcgccggcggccaacgccgccgtcgccgttcagtagcaaggaaatgacatcggcagccaccgaggagcgcactgtcattaggtggccccgcagtccgtcgcagatctgactggcattgaggaaggtcgcggggcccgggtagagcgcgaagcagtcgtgctcgacgcactggctgccacccggctgcggctctgcgggtgcggggaaccccaggccggccagggccagcgcgccaaggaccaggaccccaagcatgttacccaggcgcgccgcgtgcaggcgccggggaaagcgcgggcactgcgacagggccgtgccggagcagaggggcacaggacgccgatggcgacagcctctcctgtccgtcccagcccagacacttcttgccgctgcgcgcagcccctgcgaggcagcctctgacatgcggatcggccagggctcgagtttataagtgcccggccctccctccctggacgttcgggaaaaggaaggaagtgcctggtgggaagggctgatgccgcatactcggattgctgggttctctggccgcccttgcgcccgccctcgcgcatgggatcacctcgccgggatgagtaaaccctgccctggcgcagggaggttctcgggcggggccgacaggggcaggcgccagggaaggccagcacccctgtaacaagacgactgtccccgcccaccactcgggcccccacgcgtgcagccctctttcatctcttggtcctcctttctttcttttcatacatgttacagccacttccaaggaaagcctggattgcaagagctctgggaaccggagacttcagagaagagggctttgaatggggagtgggggaggtggtgcacaggacctgcaagacgctgggaggggtgatcggcaccaagggcactttgggaggacctgcctaggacgtggacttccccgaagacaggatcgcaaggagagacagctggatcctgtccgcggccaaggtgcctggctcaggaaaccagcggagcgcgcttggcctcacaggacagtgggtgtggctggggtgacggggcagggtggggaagactggcctaacaccagcgccctctgccccatggctggccagggacccgcgagtccctggacacgcactggccaacgccagaccccatctcatcgggtggggaagtcgcggggacactgtcagggcgccgaagtccggacccggctcagaggcggtggcaggtgaattgctgcggcgccgggtaggggcgggcgcgtgggagcgagtcagcctggccagtttcggcccagcttccgaaggatggtgcttcttgcaccccaacagagtggctggcaaccccccaggggagcgcgcaggatcccagctgatcccacccgggtcggctaaggaggtttccatttcgtccagagtccgaattgatacccacgtgcatagaaacgccacttgctcggcaaagggcactgaagagccaccgtcctgtggatgggcagggtggggggggggctggaggaggacatgggaatccgtcactttcgacctcttccggtggttcacttaccgggaatgcggaagagtgggtctccccctcgggtcgcccccataatggtgagaggcaaactgtttaaaaacacccttgcctctctcctctactgtcctcacaacgagcgccagggggcggcgctgtcgagctctaaacaaagccaaggaagttggagaagtttcgggctaaaaagggttaaggtgtaggagcacagagtcctccttctggggttggaagctccgttcccgggcagctcagcgtggattccgctgcgttcacctcttgcctccagggcccagtagatcctgggctttaaacaagaacagagagtatggcgtctgccacgtgcgacagacacgcaccggtggggtgggccgggctggactggactgacctgcagtgaccaaacgggtggggcgtggacactctgaaagtgaaaaaggcaagcacgactgtcccgccgcacactccccagcgccttggggcagagagcctccaaacgtcccgctgagttgagctcttcgctgggaaggccgccccagcacccaggaaacgaaggagctgctggacacgggggtctgaagctcccggaatgcacacagctgcgcctcccctgacgcggaccccctgggaagaggaagggaagagcggcagatagcacagtagggcttgtccggcgggagcagtcaagctgtggctgcctaggctgaatcagggggtcgtgactccggtgcacagcctgcctacgcgggacgcaaaagcagggctgcctgcggtgccgccatgggggtgagggtggagcttcagataagggcaggaacctcgttggggcactgctgaaaggtctcagaatgtggggacaattcccagagtgaatgagacaagagagggggacaggatcggttacagaatcagaaaccagtgcaaagtgaaaatgtggggtccattgttcaattacaaggattcaagactgtgatagcaaagtgttaaacaaggaatgaggccctgggggggtgatgagagggcccttctgaacctgccagccctaaaagccactgagggacattcaaggatcagatctcaccccacaccaggctggctgagttcttggatggattctagctgattcaccaacacaatgtttcactggacgtcctacacaggtccacttgcacccattgctgattcttgcaaagaaaaaaaaagtgtgagaacagccccaatagctgagtccactaagaactcagtgatgtctgtgaaacttggatcaaccctatatgaggaggtgcagatgttggatgtttctgtattagaaagaaactagagcaacaacagatagaagcagagcattgtcccatggggggtaccacagtgtctgggttgccctacacaaggatgggtggacatgacccacttggctttcccacctgtaagggctttacccctgaccctcaggatacctttgccttgtggggcctgccctcagccgctttgtttttcctctccagccaataccttggaggctttgcatattttagactaccttctggtgactgaaggtcccctgtctgtgttcttgccccatccctatcttcctatctgtgccccctgcacaccagggtgggccactccttcctatccctttgcagataacacatccacttcccaatgcttggcccagttcctggcccagcaccctcactctggcccaccagcagacttgctttactcctgaaacagctcccttgaagaacacccatctggtcctaaatactgttgccaaaatcttgttttcagccatccttctagaagccttggtgccatttgcacttgtgacccttcaccattctcaaggctcctcctccaattacttttgagacacatgttttcctcccttcctctcctgtgagccttggggaggcccctgggatcctcttgtaccacccactagagtggccattctcaaggttttgctggtggtcttcatcatctctttacaacccaccttttggtgaacttacccattcccctggcagtgatagcagtgtccaaggagattggggagggagtattctagaagggacccttaccccatctttcccagtatcaatagttggtccactgaggttttaaaccatgcacttgcctttgactttctgctctccttcatccactgcctagtttttgtgtcttgtttcccctgatcactgctcctgccttctcaatttatgctgagacagttgggtccccagctcttttccttgctgcttatctctccagctctccaccgtggctgaggctactctgatcctcatactccctcagtgctgctcccacccgctgggagagcccatactctttcccctccgcactgaagatgctcgcgatagtgcctctactctgtggccacagatgagaaaatttgcactcaaggggctatgctggaatttggacccagagcctgcaccccttgcacctcacaaggcttcaaggaccagtgttctgctggtctccatgaatgaggaaacatcctggcaagggaggctcctgctcactgtcagagaagcaccttgtccgctcatctccaccctgtagttcatgtctctccctctgctagcaacattctcgtctgccaggctcttcacccactgaaatctttccattctttcaagtcccagttcaagcttccccatcagcaagttttctgaataacccaaccagaactgatctgtctgtgattcccatagacaggtcgttctctcagctctttagtactcaccactccctccctgccctgtacctaatcatgcatataccacactttttgctgcacttatactccagattcccacacatttttgtatccccttacacctaacagcacgctttgtaactagacagtgcccagagcttattggagcacctgtggtagatgtttctttgtcctctccagggtgattttctcacattcacctgcaaagacaaggatgggggacctcagagcctcagggtgaattaagagtgtggactttggagccgacttggctgcactggagacccagctccggcattcacaagtttttgtttattgttaagatttgactaataacccctccccgtgtagctcagtttccttgactgtgtaatgggaatagtccctccttcaaagtgttaggatgaagattaaatgggttatacatgtaaagcatttagaacagaggagccgtagtcagctctcaataaattttagcaaaaaagaaaacactcaagtccctagaatttggattcggcatctgattgtattcaatatccagcatggtttcttttccatggtagggactcaccaaatgtctgttggatttaatttgttccagccaagcatttctaccactaataacaataagcaattgtgaaaaaaaatcagggatggaggcatagggaagaaattgaagcatgtcctgtcttaggcttcccatctgccctagagacatccatagtgactgtccccattgcccaggtgtggaagctgaaggccagagagaatcagtgactctccaatgtcacacagctagtaagtggtgaaacaaagattcaccggcctgtggtaaggatgaaagaattacaatgtggagtatgtctgagcccccattttgccacatactggcctacttggctaagttatttcaatctctggtgttctttcccaaaaactggagatataatatctaatatgtaggattagtgtaaaataaaactctttcccaaaaactggagatataatatctaatatgtaggattagtgtaaaataaaacagaaaatgtacatacagtgactattacttttcttggaagacagcagctgtttaacaaatatggttgttattactgctatatataaaaaaaaaagctttatcaaagacccctgtggtcactggtagccatccaggaagtcttgctttttatttatttattgactgattgattgacttttgagacagagtctcaaaatcggtagcccagactagagtgcagcagtgttatcatggctcactgcagccttgacctcccagatcaagtgatccgcctatctcagcctccagagtagctgggactacaggtatgtgccatcacacccagctgatttttttcttttgtgtgtgtgtgcagaaatggggtctcactatgttgtccaggctagtctggaactcctgggctcagacaatcctccacctcagcctccaaaagtgctgagatcacatgcatgagccactatgcccagccaagcccagctttttagatgggagtttctgcttgatgtctgtggaggaggctggaccaactacctgggcagtgaacagacttcagccatttttattgaaagcaaacatgtgtgaatgttgttagaacacagatgaaaaggagtccacagacagaagggggccccagtggcattgtgctgaccccatacataccttagccatatttataatacactaacaatactaaaatgcacacataaaaattaagtctctatggctatgagcaatatataaattcaaggatggaaaaataactgtctgttaagcaaatgttatctaataactgcagcacgttagagcaaaacaagtattttccaaaattttgcctcttactcaggctttcttaaagaaacagggtaaaagtggacaattgtttgttggtctattctttagaatagactttattggtctattatttgtaaaagaaaatatgtcgcatatccaaaaaaccataccactaatatcatactcaatggtgaaacactgaaagcctcctccctaaggtcaggaacaaaacaaaaatgtcttctcttaccacttccatttaacattatgctggtgatttcagagcagttagttatgaaaaggaaatttaaaagtccaggctggaaaggaacaaataaaactacatctatttgtggatgatattaaccttttttgtatatggaaaatcctaaggaaaacacttttttaaaaaactaagaactaataaaggagttcagcagttgcaggatataagatcaatacataaaaaacaattgtatttctgtataacaataaaaaaatgaaaattatgaaaacaattccatttataatagcatcaaaaagaataacatacttgaggataaatttaacaaaagaaatgcaaaacatttgctcttaaaactacaaaacgttgctgaaagaaactttaaaaggcttaaataaatggaaagacaccctacgttcatggattggaagacttaatatgattaaggtggaaatatccccacaatttatctacaaattagatgcaatctctatcaaaatctccgcttttttctttgcagaaatttacatattgatcctagcattcacatggaagttcaagggattccaaagagccaaagaaatcttggaaaagaaaaaaatatgaacacttacttcctgatttcaaaacttaccgcaaagcaccagaaccaaaacaatatagtgctgggataaagacagacacgaatcaatggaatagaattgagaatctaaaaataaccctcacatttgtggtcaattgatttccacaagggtgccaaggcaattgaaagaatagtctcttccacaaatgattctggaacaactgcatatctacatgtggtagggtgggacctctacctcacatcaaataaaaaattaaagaaaaatggtcaaaacacttaaatgtaagattaaaactagaaaatccttagaagaaaatataggtgtaaatctttgtggccttcaataaggcactggtttcttaaatatggtacaaaaaacacaagcaatccaagaaaatgtagataagttagacattatcaaaatttaaaacttttatgcttcaaaaaaaaaaggtggagacaagccacagaatgggagaatggtaggagacatttacaaattatgtacctgataaggtctctctagaatatataaggaactacaagtcaataattaaagacaacaaacccaattaaaatgtgggcaaaagatctggatagatatttctcaaaagaaggtatataaatggccaatatatcaggacacctgagtgagaagacagatcctgtgcacatggaaagatgctcaacatcattagccattaggggaatgaaaattaaaaccacaatgagataccaatacacacccactaggatggctacaatcaaaagacagagaagaatcctcagatagtgctgatggagatgtttactggtgcaaccactttagaaagcagtttggcagttccccaaaatgctaaacaacagttaccatgtgatctagtaattctacttctaggtatatacactcaagaaaaattaaaacatatttgcacacaaaagtttctatacaaatgttcgtaataggattattcttttttttttttttgagatggagtctcgctctgtcaccaggctggagtgcagtggtgctgcaatcttggcttattgcaacctctgcctcccaggttcaagcagttctcctgcctcagcctcccaagaggctgggactataagtacacgccaccacacccagctaatttttgtatttttagtagagacggggtttcaccatgttggccaggatgatctcaatctcttggcctcataatctgcccaccttggccccccaaagtgctgggattacaggtgtgagccactgcgcccagccccagtagcattattcttcacagccaaagagtagaaagaacccaaatatccatcagctgttgaatgaatgaatggaatgtggcatgtcctgtccatataatgaaatgctatttggcaataaaaagacatgaagtactgattcatgcacaatcttgcaaacattatgctaaatgaaataagccagtcccaaaagtccacatattatatgattccatttccatgaaatgtccagaattaacaaatctagagagacgaagagtccattagtggttgcctagggattgagagtaagggggaattaggaaaagactactaatgattgcagggtttctttctggggtgattaaaatgttctagaattaatttgcaaaactctatgcgtatgccaaaagccattgaattatacattttagataggtaaactgtatgatgtgtggattatatctcagtatagctgtttttaagaagaagaacatatgttcccccagtgaatgaagcatgagagcttaagtgatgaactgccagtggacctctgagccttttcctgcagccgggggcttattgtatgaggaaggatagaatacctatagctgtctaccttgacacagaactttggatctatcatctattggatttccatggagccaaaggaagctcgggaatgcccagtgatctattcagggtcagtcatccagggtggcctactttgagagcaaagagaattttgtgtctagcagattcatgggacactaccttggtcttctcactcaggtgtcctgatatatcccctcctctcaagaggtgttttctgagaaaagtggaggaccacagaaaatagcaagagagccccagaggctgcctgctgggcaatgtctctttctgaaacatgtatctggctggacctggtaatctctgctcaggccaataggtggtgagcaagagatgaacaggcatttgggccatgggtcctctggcagttggttgaagcccacggacccctttctagaataatattttaaataaatgtatcaaataaaactcacagaattacaaaggaatccagtcatattgaaatgaaatattaaaatctcaaaaagtagcaaatatgtgatatcaaatataagtgcttcttttgggatattttaaaacacaagttctcatggtgcgccacctaaatgccataatttcaaagtggtgatcaatgtaaacaatattttgagagatctgtgacaactgtaatgtggtctgtgtctgtgatttacagcgatgacagtctctggtcctgctaacactgctctcggtatttaccttgccttttcttttctttccttttggaaggaaaggatatgctgtttcaggtgcagattagtgaaaatatagaagtaatgttttctccattcaagctgatgagacccctgaatgaagaactattcacttaaaagaacacagaactatttcggtcagttcaagtagaagcctctagaatgttattgtgtcaaggtgcgttttgccatgttagactctccctttattttctacaaaatatttgttcatagcagattatatttttattgaaaacaatgcatatttgaaagaaatgctcttacactcagaaacactgtccttggaagacaaagtcctcacaaggaagccaagaaatccacaagtgttgtttgagaaacgtcaactgtgcttcggctgttggcacacatctcctgtgggataagttcaggccttaaatgtatgcaggacaagaggcttaaaagtgagcatgtgcagagaacaaaacctatttaggcaggaaaataagataattggaactatatattttaatgctattttacagaagtatattataatatattctttaaatgcatgaaatgtgagaaattgaacaatgaaaatatctatcactaatataactgcaaatatttagtgcttgcctttaattttttgtgaaaattagagatctgaacattttgttagcacagtaagtatatttaatatacctattatcaaattataactgatagatccagtggatggaaagctatggaagtaaacacacctaatatagaaagaaatactacttatggtataggagatatatatatataattgttacagtaggtagctagtcaggcctgagcatggcaggagagggctcctccaccaccaggaatgtcagacaaccatcagatgatggtcaggcagttgttaactgtctttctaaaataatttgttgcagccagtgccagggaaagcagtctccctatcaatagaagaaacctcaaactggggatcagcagcttccagataagatctcaggagctgggtaagtgggctcaagcttgtgcattaagatgcaaaatgacagagtttaattggtatatgaccttctagggacatttgactggcaagggaagaatgcttgaagtgagcatgtgtacaactccagtaaacaaactgtgctggtaggccactgagcatgtggacagcccatcccaagggaagaatcaggggagaaaggatgcaagaccccagaagtatgccaacacataaaaccccaagtgaaaaagtcaaaccacgcacttgtatttcaagttggccacttggccctcttccaagtgtactttccttccttcttccctgctctaaagctttgtaataaactttcaatcccgctcgaaagcttgctagtctctccttctgcctctcagctgaattctttcttctgaggaggcaagaatggaggttgctgcagacccatatggatttgctgctggtaacatcattatctctgagttgaagcagcatgatttttactttcttctctttcttatattttctacatgcatttattttataagttaaaggctccactccttcattaaaaaaaggtaaaattattttttgataattgaaaattagtcagttcaaagtaatgtggctggtaatacacatcgcatttttgcagtctcttgcaaaacagaagctattctgactcccttgtagctcactaattttcaagaatttaataaaaatctgctgcctgaaagagccgctcctgtcatcttgagaaggctggggtctttgcaccccctgagttcagtgattgcttccccaaaaacacatttcacaagaggatagactttatcacatgggttcagccgggctgtgtcatagagacccatcccaactcaccccatgttattaccagtgaactactgagatgctaaatctttggcttcttggtttgagttgtggaaggacagataaacaaaagtgcctgctaagacccagatatctggaggaattctgtggatgccctagagcaaggttgacgtgccgtgtctgtcaagggcaagagagtaaacatttcagctgcaggcctttcagcctctgtcataaccactgaactctgcctttgttgtgtgaaagcagcaagcctggtggagccccacaaaatcggttatctactgccagtagcaaacctccccaaaacttagtgatgagagcaatgaatattgaaaccctggttatctgaccaagtcagtattggacaaatttgcacagagatcttttggtgatttgcagaagctggtgcaggcagacttcttattttcatcaatatctagctccatcaggactgaaaactgcagactagctactctagacttctggtggctgagaacaagcctgcaggatggcttgacagctctgggtaaactgtctgagaacatcttcagcttgggcagaacagccttccaggaatgaagatgtcacagagagcagggtgctggagagggctttactctgaagtaggggcggccaatatttgatcccatcattcagaaatccctcttctacccacaggcctggcagtgactgaggctccatctagctctgggagaagaggaagggagtggcttcccactgggggtgcctcagacctcgcttacctccacccatagctggtccacccaccatgggtgctcaaaagtagaaggaaggatggggaaacattcagtccacgtccaaatcatcgagaagacttttcagattgggaataattccgaagccagatcccagcaaggcactgccaaaaaatggctctctggggtttattttcctttggaaaggacttttgggacatacggcaagagggagctttctgggtcccttaaagggccctgcaggaaagaagggcagtgggacgcattgtctgttctccatagacaatagggcagactgcttcctccttgggactggtagttacgtttatgtttctgacaaccagctggccactgaagaagcgtggagccaacagctgcaagggataattttggcagcatcacccacggtgcaaatttaaaactccagctggttctactgcaagcagaataaacacaaacagctgataataagtaaattcagaacttgaaatatgccagagacactttatagccctctgttttctcctagtgtgcactctttgtgctctcatcctgtggtcttgagcgtgaacatcattttcatattttatcttgctatctaaaagttttatttatttgggaaataagtaggctctgaatctggggggaaaatagttgtcaagaaccaaatatttggcttcctgtttcccagaaagtgtttgctgctgtttccatttctggcccaacatttttccagagttgaaaatgtcatttaaatgagtcagtccccggggctcagaagcaatgataaagatgtggacatggccccagaacgttggagcactgctgcctctggtggactgaagggcagctggcattaaaaacaggatgttcctgctgtgatacaggcagaggaagaagaagggtatgcaaaccaaggcagtcccctgcagccttgcccctcagtgtgtggtcccagaccagcagcatcactgcacctggtagcttgttagaaatgcacaacctctgaccccaccccgacctcctgcatcagaatctgcctgttgacaaggtcttggggaaaagggtattggggaatttgctgcacacacactccgctgggcaacccaacggcctcaatgagaccagcctgcacaggattctacctgccttcccctaccttccaccacagtttcaatgatcctcttaggagtatgaaaaaggagtggccaagattgtcagcatcagcttttatcttctctctgtgaacacatatatcacttaccaacttgtcagaaaggcagattcctgggccctaattcaaacttcctgaatcagaaactctggggattgggcccagccctgtgggttttagcaagctctccagggcattctgatgcacaggtttgagaaacaactggctcattgtatgtgaggcatgaatgaagtggcctcccaggctctgctcacatcctcactaccctcatctcttcctcctgggctttccaccttgggtcctggctctaccaactcttccttggatcctgaatctacagtttctacctgcatgggcacaagtatcacaaaccttatcctgatgggatagtggaactccaccttcaagccaagataaatgtaatttgtaaaatttttgcacagacaggaggtgcagaggacattgttatcatgaagctgaaagtcatgcaataggatggaaaggaggaagactgaaggaatccaagatgctaaaagtattaagaattcatagcccaacctcatactgttgggctatgagtatgtcaacctcatactgttttctgcaaagaaacagagataataagtgctttaggttttgcaggccacttggtctgtgctgctgtaacaggagaccagccgcagaccatatataaacgaatggatgtggctgtggtccaataaaactttgtttacagactttgaaattttcataattttacatgccatgaaatatttttcttcttttgatttttttctgaccattaaaaaaatgcaaaaaagccatttttagctcacgcaccatacagaaacaggcagtgggccagagtgggcctgcaggccatagttttccaaaccctgccctacaaacattaataaagaaaaaaacttagaagatgcaggacttgcttatgaaaacttcctctacttcaaaaaagatatatatagagaagaaaaaaacccaaccactaagaagcattgtattcaaatgcaagagacaatggtgggaaaagccctctttgtcttgtttctgtccattgtggatgtttcttgtcactgttgtggaattatggtgagtgaaagagagggcgttaagaaggaagagaagagaaaggaaaagcaaaatacagtgagtatttaggaagttgtagaaggcaaagtaaggactgaaatgaccacaagcttcatattacaaggagagagaaaaatgtggttctgttctttcagttaaagagaaaaacgcttccaccttactccccaatagaaccacagatctcagagttggcttggctgagaccaggcctattggattcttggcttccggtatcatgcagcttctggtaagtcaatgtgtttgacattcctccacactctagactccccagctcccaaggaaggaacaccacctttcatcttccaggtcatttcattctgctatgaaggtgtttccatctcaaaaattggtagttcatataaagcgggcaaatgggcgccatagtcaccaccttacagacactgcactcatttacacaccattttgcatacatttgttctgactgctcttcagtgagaacttcattacttttatattacagaattgttatacttttaaaaaactttaaatatcggtcatttgtagtgagcagcttagtattttccgtgatggagtgtaatagttttccattgctgctgtggttaaaaacaacacaaacgtatcatcttagagctctggaggtaagaagtccaaaattggggcaccatcagggctgctctccttctggagaatataggggaggatcctttccttatctgttccagagatcacctttatttcttgacctgaggctcctagctccatcttcaaagccaagagcatacacagcatcttctcacctctctctctgacctctgcttctgtgtcacatctctaacccttctgccttgatattccatcttttaaggaccctgtgattgcattgggccaaccaggctgagtcatagaggcaaaagccaataaaggattaataacaaaaccaaagggaaaaaaatcctttgacagaattgccctagcatgtctggtttagcacgtgagcaaatacagcatttgggctgcgtcttatgaaatcttaatggcttgtgaatgaaatgagttaaaactatcaaccatctctcgctgaactgagcttagtgttcccacttaagaaattcatttctgaattttattaaatttttaaaatctcactaaaactatagtcctgtctgctgatttctagggtagatggccctgatgatgtaataaatcctcttcatcaagaatgtcttggtcatttgtatttctggcactgtagtcctcacagtagagcatcggtcctttgtcatctaaacaaaactcacttggatttagcagcaagaactttaaggactctgattgtcggggctgtgatcctaagcttgaaaggatcagtttattagcaatatctcacactctttttttttttttcatgttgagcagtagaatataagagatgataatgaggaaatggaaattaaagacgtgtgcgtgtgccactccctgcagattcggtttataccatggctccaggagtcacagagcgttggacacagcaggatgggtggtctgatcccagctatttgcagcccacacagtgatcaggggattctttattggtcacttttttttctttctctctaccaattaatgttccttgttcttgatccacccctttgagccaaacaaccattgaaaagatggaaacatcattttccatgaaagtacacatcttgaaccctgttataacctgaaacagaaaatgtaaaaagctgctgtcagttcctccttcagtttcagagtgcacacaaagccctactgtcaaacttaaacaatgtttatagtgaaaagaaatgattagaagcaggaaggcaccacagggagtaacaatccttcatgtttggagggattttatttgctttagcaatctgatggaaggaaaagaaaattcccattatcaggaacatcgcccatcggagtgcctagtaataaaagtgtcagcaccaataatgttattaaaagaaaacactttctaggttctgccacctacgtgttgtatccctttaaaaggaagcacagtggatagcacagtgcctgtagaggctgagctggacgtggatttgtttgccttgaagctttgtatcaacagtatgggcacctcagctctgaattttctgataaaatgaggtgtgcacgtagagttcatggcaatagtgaccttcagactcattcttcttcagatccttctttttagctagatctacaatggcattccttttcccaggaatgcgattcccaggctggccaaactcatgttgccatgtattaccccccaaggcaaatagcaaagtttcctttgaagacaataaatacatagtccatgggctggacaactggaggtgttttggaaagttctttttattttcagcaagatatggagactcactttccttggatgagtataaaacatgaaagcagttattctgtagatgtctaatggaaagctctagaatctctaccacatttcttggtgccagcatttgcattttttggctatttattggaacttggttgcatgtcattttttgttcatccatgccattttctgactatttactttgtgctaggtgccatattaaggacattaagcacattacatggaatcctcacaacaaattatttttattatccctattttactgaagatgaaattaatttaggaacagtagcctggccaaggtcatggggcagcagtgaagccagaattcaactgcagggctgtgtaactctgacatccagcatgtaaccacatctcaatccctgaaatgatttaagcaaaaggaagcaaatgagaagaaatgtgtgctctttatagttttatgcatcatgtgtgggtttgcctctgagatgtgtcaaggccctgttgaaacagtcttgtgagatgttgcttccgaaagacgtagaagcacagctgtgtgttgataatagtcccaaactggtaacacttgggtgttcatcagcaggtaaattgatacacaattgttagtgaagctgctcaggggaattctaggagcaattaagagtgaacgcacatcctatgatgtgcaaatctcaaaaacattgcacagcataaaagcagctttacataaaacagtatattctgtctgatttgaattatatgacgtcattaaacaggctaaataatccatgatggggggaaatcagaacagtggttgcctctagctggggagaaggtaaaattgagaagggggatggggaaacttcctagggtgatggtccgggtccttatcttgacagggtgttgattacacagatgtctgcatttgtcaaaactcatggaatgacacacttaaaatttgtacatttaattgtgtgtaaatcttatctcaaaagaaaaacataacaaatatcggcctctagttaatgacatgggttgacatgtttagagggatgtgtactgatgcctacaacttactcaaatgcatcacaaataagctgtattgatggctgggtggatggaaagttgtgacagaagtcaagtgacatattaaaagtgtagaatctagatggtgttcgaatctaagcggtagaattctacctaggtagaatccacacagctgttcaccgtttgtaaatttttctagcaaaatattaggaaaaagactttgcttatggagtccaggctcttttctctgtgaagctgcatttccccaaatgtcggggagacccacctgccctgttaaggaccagcggtgatctcaatctgacactgccacagtgaatgccacaggtgttctgtgccagtcagtgattcacccttgtcacagttggggaatagtgaaaggaagccttgaggggagcagtggaggtggccacggcccacctgcccagcagactgatgcccaccactatcctctctggagacaagtttggaataagagcatgattctgaggagtcagacagacttcagtttcattcctggttctgacagctgcttgctttgtgaccttaagcaatttgttgaaatacatctgagcttctatttatccatctgtgaaatgggcacaacgcatagtggctggcacaggatggaggacggtccttagcacaatgctaggcccacagaatatgctcaagcacatttcctagaaactgaagggcctgtacaggccaaaaggcctgtagcccaaaagcagggtttgactgtggccatctctaagaaagaaatgtagtcagatgattcaaaggaaaatgggtaaaagaaaaaaaccaaagctgcaagtttaaaaagtcaatgctcaggaatgatgagaggaaagtggtcttggaacacacaggggtgaccactccttcatgatgtgtgtgtgttttgatagaggtcggtataattagagatattcatgatccccaaaggcctccttatggggtaggggcttaaagacattttccctactcttggcccttccccactcaccctccctctgaccccagggcccataaagctactggagccttgtgtttggggctcagtcaatagtgaaaggaccccaacaacctgaccctgtattggtgcactacagttccatgggcaaagagaaacaagaggggtcagcattttctctggttgagactattgcttgtaccatcgcaataagtgattaaaggctttaccagtactttcattttggctcattgttgctttaattggctactccaacacctgacagctcagctctctctctctcctgctcagctgaactcctgatactcaacagaggaattaagatgcaatagtaaaatatacataaaatttaagacagctattctgcagaagactctccagagacaatgaaaagaccagccacagactggaagaaaatatttgtgaaatatatacagtctcagatggggataccatctgagaaatacatcgttaggcaatgtcattgtgtgaacatcatagagtacttacacaagcatggatggcatagcctactacacacctaggctatgtggtatggcctattgctcctaagttacgaacctgtacagcatgttactctactgatcagtagaggcaattgtaacacaatggtaagtattcatatgtcttaacatctgaacatagaaaaagtatagtaaaaatacagtattataatcttatgggatcatcttcatatacatggtttgtcattgattgaaatgtcattatgcagtgcatgactttatctgatgaagggctaatatccaaaatatacaaagaaaccctaaaactcaacaataaaaaaaacccatataaaaatgggccaaggatttaaatgaacacctctccaaaaaagaggcacaggtggcaaagaagtattgaagagatgctcaatagcacatgtaattagggaattgcaaattaaaacagcaatgagatatcactacatacctaatagaatggctaaaatccagaacactgacaattccaaatgttggcaaggttgtagagcagcaggaactcattcattgctggtgggaatgcaaaatgataaacgctttggaagatggtctggcagtttcctacaaatctaaacatactcttaccatccagaaattgcactcttaggtatttactcaaatgagtagaaaaattatatccataaaaacatctgcacatgaatatttatagcagctttactcataattgccgaattttggaagcaaccaagatgtcctttgctaggtgaatggataaataaacagtgctctattcagacaatgcaatattattcagcacaaaaaagaaatgagctatcaaaccatgaaaatgtttagaagaaacctaaatgcatattattaagtgaaagaagccaatctgaaaaggctacatattctatgattccaactatatgacactctagaaaaggtaaaactatggagacagtgaaaagatcatggtttccaggagttgggagggaagaagaggcagagcacagaggatttttagggcagagaaacgattctgcatgacactgtgacagtggaacacatcattagtcattacatgtttgtcaaaatccatgaaatgtacaacagtaagaataaaccctaatgtaaactttgggctttagttaataataatatgtcaatattagctcatcaagtttaacaaatgtaccgcaccaacatgagggaaaccaaattatttctcccaaaatattgagggttgttcagctaaaaatgccacaagcacagggaagcacttggcctcggccgctgtttggctgacggcagcacacaagcccttccttactgaagacagcactcgcttcccagcccagagagggcatcagcaggcacaagagacatctggaagggggctctactatcttcccagatcttcctgccttttaaaagacaagaactgctctcctctttgttttgtcactacataggatttatggctctttgctgaaatactatttaaccaaggacccctaagccattgccttcagaaatacttttggactggccgggcacggtggctcgcgcctgtaatcccagcactttgggaggcagaggcgggctgatcacgaggtcaggagatcgagaccatcctggctaacacaatgaaaccccgtctctattaaaaacacagaaaattagccgggcgtggtggcgggtgcctgtagtcccagctactcgggaggctgacgcaggagaatggcgtgaacccaggaggcagaggttgcagtgagccaagactgcgccactgcactccagcctgggcgacagagcgagactccgtctcaaaaaaaaaaaaagaaagaaagaaatacttttggactaaggcttcccctgtgtgatgggtactacataaattaataaacttctgcttgtttttcttatgttaatttgacatctgttttcaggagagtttctcacctaataacgtaaaaaggaaaagaaaggaaattatgttttctctcccacaactgcaagttgttgaaacatcttgcgggatgggattggaggaggcatatatgggaattttctgtactttctacctaattcatctgtagacctaacgtttctcaaaaatgaaattataataatttaaaaaggatacttgaataaccccaaagaaaacaggaaaagagaactgaaaggaagggaaggaggaggaggtggaggaggaaggtaggaaaggtagaaaaagaaccgaataacaggcctaaccccaataaatgctgattctatctacgaatacttctaaaacaggccaaacaaatctgtggtgatagacagcagaacagtgtttgtctatggggtggaacttgattgcaaggagcataggaaacttactaggggtgatggatagttacacatcttgaccaaagtgatggttacaatggtatatacatttatcaaaatgcattaaattgtacagttgggattcgtacctttctctgcatataaatcttacttcaactttttaaaaaggattaaaaatgcttccttggtgagcgggacttctgtgtgaggcctgtaggcacagcagccatgctgtaggcacgaggatgcaagccacatgctcgctggtgcggaggaccaaaagaagaaatgcagccgaaagcagctgcagcagccctggctttcccacctctgaatttcttgtcatgagagaaaaataagcattatgttaaccaggctttaatatgcacaggcaaatttactgctaaatattataagtttattaacatatttagatataagcaggaccagaataacatacctagaacagatactgattttcttgcattcatgtaataatcatttaaaattcatatctgctttacgcgaatagatataaacatagagctaagtgctcctacaagatgaatttttagtaggctaaacagcacagctaaagtctcttatgaacctcatttccccaacatatctttcatctctctctctttttggtttgtttcttgtttgttaagctaatgggtgtattaattccatcccaatgtgactccaaattttgaaattataaggcccaaatgaattattttttctttgctcaaataggatacatacctcatctgaagacaattcaacatataacaaaagttaatgaacggcatttcactgcagtcacaaacccattaagcatcaaatccaggcgctgtgaacatcaaagaagtcaaactgggcaactggtctctcctgtgcaatgggaaaacctcctaatgaagggccatgactttattgttgacaccgattccacttcaaacttggcgtctgcaatctctgccagaagattttccgaggttgtttttaagtcataaagttaaataacatgaaatgttgtctccatagtaaaagatgctttcctaaaactgaagggcctctagccaaaagacctacagccaaaaagcagggtttggctgtggccatctctaagaaagaaatgtagtcagatgattcaaaggaaaatgggtaaacaaaaaaaaacaaagctgcaagtttaaaaagtcaatactcaggattgatgaaaggaaagtggccttggaacacacagaggtgaccgctccttcatgatgtgtgtgtgttttgatggaggccagtataattagggatattcatgatccctgtggtgctttggtgggaggtggaggaggacagtcagagacagatgtcttcccagtctccagtgctgagcagaggatttggtaaagcaaccggcagtggataaagtgtagaaagtacaaaactaactccagcccacaatagtcattcactttttgataccactgaaatgacgaagtcaaaagcaatcatgtttcccacttctagaaaaatattcaggtcacaatttgtaaatcttttgtttaatttataacaatgattagcagcatttaaaaatcaactttattgaggtttaatttgcatacaataaaatgtacccattttctgtgtggtctaaggagttttgacaaatgcaaacgcccatgtaaccaacacccaatcaagacacaagtatttccttcattccacgaaggtccctcaaggtcttttgctcccaaccctcacccccactctcacataaccattgaactaccatccatcactgcggattagttttacctcttctagaatgtcatagaaatggaatcaggcagtgtccagctaattttgttcctttgtgtctggctttcttgctcattgtgtatttcagacgcctgctccttttccttgataagggatatcccattgtgtgcatgacccacagtcttcacccagctacctaatgatgaatgtctgggttctttccagatcgaagctgtataaataaaccttgtgaatatctatggccaagacaatgtagatcatggcttcattcccttaaataaatatctaagagcagaattgtcaggttgtacgttaagtgtatgtttaactttctaagaaagaaaccatctgtttttaaagaagttataccgtttacatttctattaccgtgtgcaagagttccagttgggaagtagcctctgagcaggtcgggaccatggggcgatttgcacattcccacttcccttcctctcctactgcattcaaacacattgctctcaccaaggcagactggggatagccacgtggggggactgtgagggtgcgttccctgggatctgccctcagagcaggcaaggcaggtctcaggatgcacaatctttctgatcagagggcttttgagtagttctaccccagtgtgtgtgtgcgtgtgtgtgtgtgtgtgtgtgtgtgtgtgtttggggggtacatacacaagcccaagtaagtttgtttgaacatattattaaaaatacccatattgcttaacactctgcttttcctatctgaaactggctgagaggcccactcatctccccactctttgctggttgacactttttcaattgcagttcctattcatgtctaatgggaggcagggaagcctagtgattaagagtgagagtgtaagatttcattcatctaattcaccactcatcttctctctgcctcaatttccttaactataaaatggagatattaatactacctatttctcaatagcaaatactattttcccatttggtacatagtaaaaggtcagtgatttttttcctcttcattgctttaataacatatgtggtataaaataacatatccggggtcttgtatttaaaaaatcttttgaggcttgactgtgagcaaggcacaatacagatgtacccgttgctcttgagtgccttacagtctctcaggaagacacaagtcatgtagccactgacctatcatgcaaggaataaagtgataaaagccagcagaaaactcctgagagagaaatccatccccatggatacagctcctcctggggaaatggaggcatgacctctagaggcagggaggactgtctgcactgagtttagaggacagctgtgtgctggaggctgccagtgctcaacaaatcgtgcttgcacttttcactgtgctcaggtgaagtacacctgccagggcctgcatctgtacctgaaggtttccccatcctaagtgtggaaggccactttgcccacatgtgtggtcatctggaagtgctgggaattacccgccacctccacccagggcagccctctactcattaccaatgggtatctacacaccactcccttggctttcagatgtgatgaccctggcatgttttgcaccatttcccaggatttctacagtgatgtcaccacttgatgccattaccactgttccctgtgcttcccagtgaaccacaggatggtgagtccttctctcaggctctgtttctgggagctggagtgcaaagagccccagaccagctggatatggcggccacaattcagagcagcaatagtgaagacttgagtgcaggccgtgccatgagctggagacaggggacaggtggcagatggtggaggaagaggccctggacagcatcgaggctcacacaggcccaccaggagggtgtgctagcccaccctacctggtacactgctccaacccccagctcagtcatgcattccacatgtgtttactgagcaccacagtatgccaggccctggtctagaggcctagggtatatcagaaaccaaaagacaaaaaagtgcccctgttggctcttacattctagtaaataaatacagatactaaataatcaatcatagtgtacaaacagaaatcataaaccagggtggaaggtgattggtgttttggaaaaacagtagagcagagcaaggatcgctgggagtgctggagagaaggcccagccttatagcccactgggagaagataggtacaaagtgaggaaggaaagaaccatctaaaattgtttccaaaataagagagtcaagacaatgaacaagaaggtatactaacaagaataagagaagatcactcaagaccaaatgaagcagcggttctccaagggcggttcctggaccagcagcatcagcagaaatgcagtcttgggctccaccccagatcggccaagtcagaagctctgagggaggggttccgttttaaggagccctgcaggaggttccagaggattcagacacatgctcaggttcaaatacagctagaaggaaatgccctcctgtgctgggaagagctcacctagtgcaggcgggaccagaaaggaaccacacctgcaacctgaagcgaaacctcagaactcaacagagaataagaaaattgccaaagcactcggggaaaaatggaaaagaaaaagaaggccgggcgaatcccagcactttgggaggccgaggtgggtggatcatgaggtcaggagttcgagaccagcctgaccaatgtggtgaaaccccgtctctactaaaaatacaaaaaaaaattagtcgggcatggtggcgtgtgcctgtaatcccagctactcaggagggctgaggcaggagaatcgcttcaacccgggagacggaggttgcagtgagccgagatcacaccactgcactccagcctgggtgacagagcgagactctatctcaaaaaaaaaaaaaaaaaaaaaggaaaaaagaaagaaatggtccatgaaagaaaacacattatttgacatcagccttctcatcagtaacaacgtatgcaagaaagcaaaggctggatatctccagagttctacaggacaacagtttagagcctagaaatctatgtctaggtgaggcatcattcaacttgcggaagggaaaggcatttctggtcatgcaagcatgaccttctcagaaaaagacacaactcaaaacaaaacactcccgtgataactgaatccaacagtactgggaatcagaggtgaagatgagaaaaaatcaacaaaaactcatggcatccaagtaggttttggttgtaaaaatgtataacaataaaaaaataaaattcagatgcaatccaggtgggcagtggtgtgggaatctgggtaacctgagaggacaggaaatagaaataacagattgctgggtattttggggaatagagggaggagatagctattaattaacacaagacattaatagaagatataggctttagtatgtgaggtgaaaaagtaagactatttgaagaatacaaatagtctatatcaattccaaaatattaagggaaaaagtagatcaaagaaaacttaatcaatctaataattgacgagagagaggctagaaatcccaatgaatcattataaatggaacatataaaataagtcagtacaaatttattagtaaccttaatgaatgtgaatagattgaattctcccattaaaagacaaagacttttgattgaataaaagaaaaaaaaagtgaaatccagctttgttgtttacaagagacaaacatgaagtgtcaccagaaggctgaatttagggaaaaaataccagatattcatcagatgcagcagaatgaatcgggtatatcagttgtaaagtcatatataatataatttgaagtgaaaaggttcaaaaaggtatattttttattggtgaaggatgaaatctgccaaacacatattagtcccttcaccacgcggctgtaaatagaagacaaaactggtggaaatccgaggagaagctgacgaagccacagccatgggggatgagggcctggatggaggccagggcatgaggacttgcaggacggatgagaaggaaagcagacaagggcgtgacaccccgacaaacacacgtgggacaggaggcagcgatttcaacaatgaagtaaaacatttgtgatataacgtttttgggaaagccagaccctggagaaagaaggtagacgtcccaattattttcttccacctcacaaatttcattatttcatgatacttgaacacagtaggagccccacagagacaggtcacaggcttggcttcagaccttacaatatgaactatgtggacaggcgtaaggccagtggcagaggcaagcaggctttgcaggaaggtgacaggagggtgctgggcctcaccaaggccagcagaacgaagtggcctgaaattcgcaccggcacgccctgagaaactcagcccttccttctcaggctccaagcccagctttgtgagacctgattgtgaccaccacacctgggacattcctctacccccttttgtgttctctctctctcttctctccctcatctctccttccttctctttcccatttattcattccctccctaccattcattccttcccattcattcccttctttcctccctccctccctccctctccctccctcctccctctccctcccttcctccctctccctcccttcctcccttcctcttttcctcccttccatcctttcttccactcagttgaattctatgaaccaattttaaccacaagagaacatcatcatccaagttaatcacgacaaacctcaaatagaacccaactaccagaactcagagagggacaaccgctcatggagagtttggtggtggttctcctggggactcaggagagggcctgtgcctgagctgcatgctgagcacccttaagtcaatcacagttccggaaaaatgattgcacttgatctataccttttactctctctgcctctttcttcactttttcactgttgagctgttcataatttcctctgaaaagggagagttaggaggcattcagaggatctgaagggtaaacccattagtcattctgtttctaagcacctgtaatgtcaaatataattcagggaaaggctgactccgacttctctggttttcaagtttatcatctctgctctctgtatctcctcttgctgaatatacacaagagtcagctgagaacttgataggctcactcaatgcatgttcaatcccacagaaggtacatagtacatgtctgagtctctcattgtaatctgcattttgtctgatgatagcaacacaaatgtactctgcattgtgcaatagatatgtgtgcaaattaatttttcttggcaaattatttgtttgcgaatgatttacctagcatttaagaaattttagtgagatagcaaaagtcaccaaaaaatgtaaccatcacaagttggtgttttctttcataggcttttcctaaattgagaaacactggcctcaggtgttccagtacgacacagaaggatgttagaactgtgtgtgcttgtgggtgtgtgtcttgtgggtgtgtgttgtgtgtgtttgtggatgcatatctctgtgtcatgcatgtgtgtgtttatgtgtgtgggtgtgtgtgttgggggaacagccatggttgttcatatcgaggaataatttccaagtgtatgttgttaatgaatagacttctaacaggatcagctgcatttaaccctaaataatggatatttattgcaagtgtcctgtaccattagcataacagagcagaaccctttgttcttcttaagtcctgtgcctttgccacagccttttgcacaatcttaaaagcaggctgactcagaattgaccaccatctgctgttcctgacttggaatcaccatgagatttgtgcagccaaacaaccagcgatctgatctgcctgtccaattagttaaataaactgaaagggctttgctgacaaagtagtgataaatgctccaatgataattatagaacagtgttttcacatcgcatccattggacatgtttaattctgcgccaggcatcacccatgtaatttacaagatgcagagaattaaagagtgatgagggggccatggatgagtggactcagctgccatggacactgggcgcagtgcagcccagccctctgtattccatgtccccaagggcagcacgctgaggggcagggtacacatttgctgaggtaatgaaggaaggcagagcccagcgccccctgtcgcctccagcaggtgcaggtgcagaaactcagccacaaggtaccttctttttagcaactctttgaaaggggagatggataaatgtaatgaccttgaaagcaagttctgccaggtatttcgagttgtcgtgaaatatattaaaacaagttcacaatcaatgtgtttaagagtttattaggataggcacataacagaaagctcaaaggacaacaaagctgcaccttcctaaaggctgaccctcaaagcaccattttgttagaactcagaggagaagctcgatctctgagccttccctcctcacagtttgggaaacatgcacaggatgaaggtaaatcctgcatagaaatcttgtaattccagaattagtcaaacaaatttgaaatacacacatttaaaaatacttacattctcatttagcattcatgaagtgattactgacatttacaattacatctgacatcacagagcaagcctttgcagggatctaattcaagcttaagccaaatctatgcaaagaacttcagctcagaggaatagtgggcaaaatctgctgaaaagaactgcttgccaccttgcagataagagcaacagcacaataaagggattccagagcttctacctaaaatagaagggcattatctacaagaacagaccaaaacacaatttatttttaaacaagcccttcagtgagtatttgtctcaggaatctagtatgaaaatagtgtctttgattagtgaatatatggagaattcggattatcatctctatttttagttgagaaaatgcacaaaccatatagatttaaaccatgggttttgcagccgaagtagagacagatgttttctgggatcatatctcagattcccaagctaaagctattgttcaaggtgatggaaatatgtagggggcattaaaccattttgcagctgctagaaagctgtgttttcctgttttcctgatttagacaatggagaagctaagaagagaaataataggaaaggctttcctatgttagttttaaaaagactgtgttatttttaattcaatttttttttgtcaaatctcatctctgttctcctagttttcacagaaatatttacaggaataaaggttgaaacaaaagtacctaatgatcatctccatccatcgaaagattgctcagggataagacactcaaacaagggcttgtgatgaggatggaaaagacaaagcaacttgaagagaaaaaaaaattcttttaaactcagttcatcctgcaaaatggacataacacatgcatataaaggtttgactttttaattccacttttttgcctgatcgcagggaagatggcatgtggctggcccttcctgaagccttgctcctccaccactggctaacagacaggcctccaggtggccttgcaaggccgacagtgaccgcagcccacttccccacatccttaatcagagcctcatgcagttcatccccacattacccaaacataacgtcgtagtgctacacgtagatgtgttgcatcatgatgctatggcaatgacgatgacgcttaggtgtgtgggccaccgaaggcagagaccagatgtggttggtcttgcctggaagccaagctgttgagcaggggtggagtccctctacagaggatgctcaccaagttctaatgcattgtcgataactgtcctgccctggtttttctgcattcctcagattatctgtgggaattgtcctcctgcatcctttctcaaatgacaaagaagaaagaaagagcagtgatggcacctgaaattcaggaatgagtaggcatggcgagctgggtgtgtgagatgttctctctttacattgtctgctttgagatgtgggatgaggggagggagagagttggtcctgaatatattcagttttttccaagagtctcccagaattattgacctatttggacaacaaatcttcattgtcttggtgtccatctccaagtgaaaacttcccccgtccccatggccctggcttgttctgctgctgaacaggtcacctgggcagaaacactgtgtctagcgagaagttagcaggtggcagggtgcacctctccccatactgtgacccttggattccccactgtgccacgcccgagcaagctggggcccctcaggacaaggacgatttgttaatggcctcttggccggtgggcatttgtttacccactactgtagccccaagatcccccaaacaagaatttccatgcttcaaagtaacagcaaaaataaacaggagaataaagcacgtgtttgagcccagtggtttccatcagatgcacaacctgagctgtctggttgggttgctggctctccccccgtggtgggagtggtgtgcaagagaaagcaccacccagcaggagagggacccagcctgccagggaaggttttgaggaactggattctttatcacccatttctccccttgtgggttccacagaggggttccatgacctccctgttgttgagaacagggctgcattcagagaacagacgatgggcctgggctgtgagagcaatcagaacactgtgaaaataggagggctcgttggatcccaggaatcatacacagactgcgttggggctgtgggaagccaaggacagaaatgtctccttcaccccaaatgataagggcaaggattttcaaggcccagagggagaaatgttgcatttgcatttatttaagtgctgatgttggtcagcagcgcatccagccatgtctttagaatcctctgaatggccagacagatggctgctctccacaccacagactgcccagcttcacacatcacctagagtctcgtggccaaggaagttttgccaaatggacacagcctttgtctcccttaagtgttaaacaccagagttccaactgaaaactggagaccatgagatgactttaaaaagaagttccaaatgccccatcgagccgcacaaaacctccatctttcctttcacttcccctgcccctttagttttctattaaaaacaatctgaaccatagcatctatatttcaaaactggcaagagtattaaccctgcaccttgtggcccttcaaccactccagagtgtcacctcagagaccgatgcattgctaaggcaaaaccagaaacaccctttctctgaggctttggggccttggagggagacacatttcctctgtctgttctcctgcacagtggtggtaaaaagcccacaggagacatgaggcctcccagagatactcaggtaacttctagtgactctgaccatcggtgacccccaggaatgtgttccagtgccccaggcagaatggtgccgtgtctctgtgtgtgtgtgtgtgtgtgtgtgtgtgtgtgtgagagagagagagagagagaaagagtgcacactatcgactacattatcatagggagaaatatttgcaaatgtaacttttaaaatgaggatataatttaaatggctttgagcagtttttgctgtaaaaatgattttagttagtcatctctttccctcttccttccctccttacccccaattttaaggaaaagagacagagaacaaaagttccttaagcaaactgcctgactagctccctacttggtgtgtgcgccacccacacttcaggatttaaaatctcaggatgctgcatcaactgtggactatgaactgtgctaaaatgctttaaaatgacaactttcaaaacacagtgcatcatctcccgttcacacatcctttaggaaacagcctgatggaactttctgcagggcttcctctgtctgagctcggagcactggcattccgggcaggatgaagtggaggcggggccacaggcagggtgtctgaggcctgccctggctcaaagacaggttgtccttgaatttgtttccttgttagtgttgatcacatccgtagtcaagtgtgtggtaacctcagtacatttggatgaattaattcaagtatctgtgaacaaatccctggcctctctcgccctagccccgtagattatgtgacttcacaaacacctgtaatgcacttcaagcaacttttctcatatttttcaagcttcctttgcaaataaacccaaggctattagaaatgtaagaactaaagaggcacttcctgcctccttgccacctaagaggttaattgcacttctggccattctggaggatgtcaacagtatcacatttagcaagacttgtgctggcgaaatggaggaatgcaaatgtaaagaaatgtttccagtccgaacatgttccctttgaccaaaaaaccagatcttcttacctaattgaataattaattgatttagttttcatcctaggaagagaaacaaatcatttcaatcctaatcagcatgagcaactcaccttttcctcttagatggtggaagtgagcagagaagatattcaggggagccccttagccccggcctcctcacaccctgatccggaattggtcacattggaatttgaaaagggagggggagtaacaatcattatagagtcacgaaatccccaccgtggcacgccaacacacagcttccacttcaggaacatcaaacacccgtagaaaatacctgcatgttccaaggggcctttaaggaggagacttacaattgtttgctaagattccagtccagtctttcaaaaaaatgtgggtgcccctttggaatggggagttcaaagctctgaggatggtggctggtgactctagtgtctctagggccacctcactttcagcagtctgtcccaggtgtcggactatgggaaacaaaacagacagcgttggaagccatggcgcctctgtgcctgcacgtccccaccttgggagagagccccacgtgcggccgtgctgcagatgggcagtatgctctaagggggcccgagtgcctggcgtggggggaggttgaggggtcagctgcaaggaccagggtgtgtctgcccacaggaaacctgggcctgctcttgctgccacctctttgtactgtagtcagtgcccccatgcctgcccatcccctcccccggtcactcagggccccctttacctgtactggttctccatggccctgctctcagctcgctctggaacccaggagtaactgtctgccgcattctggggcttcttctccttcttctcctccctcttcgctctccgcttgcgatagaccagtagccccagagccagggccagcaggagtaggatggccaccacggtgcctaggatgtagaataaaagcagcttttgcccgtcagtgccatcgttgttttgtgtggccacggaggagtccccacctgcaggctcctgggggccagaggcagctgtggcgtgatggatgctgggctccctccagacgcctggggacccactgggggccagcatcttgagtggggcagatgtgatgggggcgtcagatgacagcgaaggtctacttgtggtgggtgtagccttgggggtgccctcggggccccttgtgggactggctgttgcagcacggggcacggtgctcccttctttctctcctttgtcctcctcatcggggggcccagatggtggtcccagagacacaggccccatggtgcaagagaccccatttggggccagcacccagcctggcaggcagccacagtggaaggacccttgtgtgttgaagcacaagctgtcgcagagggggccccccgggcccacacactcatccacgtcctggcactgagtcccgtcctccccggccaggacgtagccctcctcacaggagcagtgaaatgagccatctgtgttggtgcagccctgggcgcaaggcgagcgacccagagcacactcatccacatcctgacaggccccctctccaggaccgcccggctcatagccaacccagcattcgcagcggaagcccccaggggtgttgacacactcctgggcacagggggagtcctggcattcatccacgtccacacagtccagctgactcgagtccagctggtacccttgggggcagcggcacgtgtagtttttcccatggggtcccaggacgcacgtggcccccccacgacatgggctggagctgcaagggtttcgagaggcacaggtcaccaggtcatccagcagccggaatcctggtcggcagccgcagaggaaggagccatcccccccttcaaagcagtcctggtggcagcccccattgttgaagttgcagccatacttggggctgacacagagggggcccgagctgccccagtcgaacacatcgggggccttctccttgcacaggaaataatgactctgagtctcgtccttgtcaccttccccacaggctacattggccgcagaggcaaagggcacagcctccaaggaggaactggtggtctggaagggggtggtgtaggtcacctgacctgggccccccagggccagaggccggcacatgcctttgaagctgaacttgcacacgaagccctcaatgttacttccgggggagcctgggctcccacaggggccctcagaccacttggggaggcggctgggaaggagcggctgggacaggtccagcagcagagacacacagcgcttggagatgcacgagttccggagctccttgtgccagttagagtaaggcgtgtcctcccccccgcccacccagctgaagcccttcagcggcagactagggtccaggcacttgcccttctctcgctggagcccaatccagaacttgctcatcctcgccgtcagggctgcctcccgcctcaggagctgggccagtactcgctggacgtgctgggcctcctccttgctcttcacagtggccaggttgcccccgttctggttgcagtggttctgggcctcggcagcgctcagcttgcccgagtgggccgtgtagcaggcggtccccacgcagaccaccgcctccgtgtcagctcccgtccccgccccgggctgggtcaggagcagcagcagcagcagcagcaggcccatggaggtggccatcccggtctctgtgtggccctctgcgggaggcgagaagcccagcggcgacaggagcttctatctcggctcccagctgggccccaaggggagctgaggggtgagctgcagccactccggcgcagagaaggacacaaaggctgagggctttccacgtccccctgacccaaggcgcatcctgtactgttgtacttcttatttctcaccggatgttggggcttcctgcaatgaatagttctctgactcctgctgccttcatcacggtgctgttgttcataaaaggagtcaggcagctctgccgggtccctggctcagcactgtggaaacagcgacggggggaagacgttacagccccgagatactgccggcttgattttggctccattctctttctcatggcatgaggagcctcggaggcatgccatggagtgagcaggggctttgggggctaggaactcgaggaagctcccttagtaacccataataaaattccactttggtttgcaaaccaccaaaagagaaaaaaaaaattctgagacttaagacacaaggccatggatggttataattttcagccttttttagaagcaaactggactttccttttgcctagctcatgttctctgttgactttgggagccttttttcttttatcctcccatcgtgaaccttaaatagacaggcattttttaaataggatacgggtcgtgggaatgtctgggttttcaacataatgccaagctcctcgataatgttaatccaaattgggtgaaatttggcagttctgggggtttcatagtggaaatattgcattgtgaggtgtcagggtcacaaaaagcatcagaaagaaaatgaaaatgtgtccggcctcgtggcgcagggcttgcaggctcacttcccccggctcaggattcctagcaagggccggaaatctgggcagggagcgggaatcgaagcccgggcaggccctcccgcgacaccgcgactcggcaaaagccagggactcacagtgtgcttttcctgcagccacagacctttgctcattggttgggatcccccaggaggggaccctgagacaggatttggggagactagtttatgtgggaggggaagtgaaacagacaaggaggaagccaacccatgatgacttgctgagaaggtgaccctgggctgctggagccagtgccaggaaactctgggggcctgaggggaccacacctcagcaccatctcagctgagggagaggctccactgctctccaagtcccctgtcattggtagcaggctgtatctctcactttgagagactgactataaattctagccctgcccagtgaccaggggtctctctcacataaaacttgtttctatggacagacacccttgtggctctcgtctgacccatgtccagtttattcctatcaagacagccacttcctaagagatccctgatgggaggagagttgggttggggtgtgggtcaggggagatgcaggaggcagcacaagaagacacaggaagcaacacaagcaccgtgtcacttacagatcccagggagagggcagtgcaccccacggggccagcaaaaagtggggagctgtctgggtcacaaacactcacctggaggggggtgaagggagagagagagacctgggtcctaagcctttattggggtccaggacgtttcccaagcaggtttcccaaggggacttctcactggtgggtttagagcaaacagacacgggctccgtggggtccctgtggctgagaggtgggcatggcggcatgtctgggaagtccctgtggggtgtggagtcactgagaccatcaaatgggctgtatctgcctgtcccacagggaaatggtcaccaggaggtgggtgtacaaggcagatatctgggttggccgcattgaggaactgggagggggtggagccctagacaccgtgtcaagagcaataaaccctgcttctggtaggagagggtccaaattagattcaaaatggatgcaatgcacaattataagaattctctacacagcggcaactctttggtgctctgcactgaccgtgagggccccaggggaagaagcgccacggtggagaacacagtgaacgcctgtggacccggcaccagcgaccaccacagtggcctccatggagatgttgagttgtcccgggggctaggagctcgctggctccccaagggacaaggaggcatctctgactccagctggatacctcctaagaatgtgccttaagtccttgcattttagcaaagatatttgagacattttgggaactctccatagaagccaccagaccctccctgtgccccttcattcatccatctgtttgtccatccacccatctaacaattgttgattaagaccctgctatgcactgagtgaggcactggattccaggaggggatccctgcctctgtgatcctggagtcctgttagagtggacaactttgaacaagtcacggcactgatggctttattgcaggcagcacaggggagcggggaggtcgtggttgatacaggggtggcatcctgactgggggatgggcaattaggagagactcctctggagaagacaggcagtcaagccggaatctaaaggagaagcagctcagatgtggaatggtgtcgggatgggggaacagcatgtacagaagccctggggacagagagtgagtgaagggcagggagaccaaagcccaggcagtgggagggaggatgcaggggaagatggagccctgtgaaccccagtaatgaaggcttgaggcttcgtcttgaaatccacggggaaacactgagggctggcatgaggcctacatgtggaaggggactggtcagtggacccaagcagtgggtgggggggccctcagcaggtggccgcaggtttccaggctgtggagtccaggtcagatgttctcggggctgggtggaggtggggggaagggcaccgggcacgcagaaggactgcatggctcctgccgggagctggggtcctggaaggctgtgtccgctggaggtacctggttctgagaacacaggggattgcctcttggggctcagggtctcccagaccccctgtccttgtgacctgcctcctcgggacgctaagtgtgccaccagagctgggtaagcagccagctgtgaggggtccagggaaggctggtgtccctggctcccagtcaatatagctggccatgcatttgagtttggcaagggtcagtcttgttctctgcttgggagaagcttcatttctaagggtttatttacaagcaggtaacttcttaacattctgtaaaatcaattctgcagccctagcatccactcatagcagggagccgttctcgtggtctaggcccctgtttgtgcagctcggaggtagattcctcagaggtagattgtgatctgcagcattcgctcagcattctacttagttggtgcttaaggatatgggctaaatgagtgactttcagcatgttagccactctgacccccagatctttgtcaagatatcttctttagctgtaagttattcatcttccatgtgggaactttcaaaccaattactgttcacttagccaagtgatgacatcttaaagaagaaaatgaactagcaagacatatactctgttttttatccattaaccttggaagtatttgtaaagcaccaacagtgagaaagactatgtaaaatgcagaaactgccttgccctgggggtccttggattttactttattattttcagtaacttggttaactcagccccacttctcatctataaatgcagaggtgggaacagggcctctggaaactttcttgctctaacattaataaaagtgaaatcatgcttaactctcccctctggaattagggagaaagcaagttgggaagagagtggacactgagaccattgctgagccctcgacatactgcacatgtaagcaaacctctgtctaaactgcacacacccaatttcatcccaaattgacccgctgactgccaagacacagggtagtttcctattccttgtcccccacatctgacttccactgtgtcccttcaccctttggctgatccctgctgggctcaggtgggttaattcacctgggacacttacagctaggttctctagctccagccccgcccttctgtgtccgctcccacctataggggacgctccttagaggctgttcaggggattcgtagaggctgagggcatggtgcttcgacctcaggggaggatgaagagcttgcttttcctgggagggatttggtggagttttacaaagaatttaagatagtctgaatgcaaactttgagggaattctgcacctcacatactaaattccccatggatggtgtttcatcccattttatttagagagcagattataccagacctctccaaggaccgatacttaaacagcaggaatcagcagaaggagatggaaaaagtttttctcggcagatctttggacggaagccacgttaggtgttctagaaccatggcgagcctaacagcatggcatgtaccctgagcaaaaggctcctcaccatttgtgtgtattctgcagtctttatgagtactctgagctttctttttaaattgccttaaaaatttactttgcacgatgctggaatggaatgttctgatctcaaatatggggcgagtttaatctcagttatttgggagcagactaattggtttgtggatcattcaggcatccggcctgtctttttcctttttttttttttttgtaactaaaaattaaattaaaaagggaaacaaagcacactgcgtatttcctggcataacatggtatatggtagactcacaatgagcaacagtggcacagaaatggtggaggaaatgaaacagaactggagtcactgtgacctgtcattctatgggaccacttagggattttgtgttcaaagtttaaaacagaaacagagtgaaaactgtgagacctgatatttttgtttgtcagtacagattttagttcatacatgaggcgcttaacagaatttgaataacatttttgtaaaattgaaatttgtcctttattaatcgtttgctttaaaacttaaaaaactaggaaaatcactaatattgattatgacatgatgatttctgaaagtcattgtgttgtacagaggtgaggggtgctacaaggttcaccctgggcacaaagatgccaggattgctgcaggcaaccccactcgaggacacccgtctgcccttgggggaggctcatcgattgaccatctgtcctgcattgagagggatagaggctgggggcagtggctcttgcctataatcccaacaatttgggaggccaaagtgagtggatcacttgagcccaggagttcgagacctcatctctacttaaaaaaaaagagaaaagatgagtggagtgtggtggtgtgtgcctgtagtcctagctactcggaggactgaggtgggaggaggattgcttgaaccaggaaggcagaggttgtagtgatcaagccactgcactccagcctggaagatggagccaggccctgtctcaaaaaaaaaaaaaaaagagagagagaaaggctggaacctgtctgcactgggttacaatcccactctgtgacttacagctgtgtgactaaggtcacgtctgagccactctgtccactgttatatggtacagctatctgtgactccacaccctcagctgtctccgactctcacagggctttgtgagggctaagagagtgcatacctaaaagaagctcagaaaagcacctggcaggaacagtgaattcctatcacaccaggacacggtggcctgagaccaccctgactctactcccgcaactggaactggggcctcagccagttgctggctttgggattgggaccaacactttcacttcttggggccttggtttcttagtttacaaaacagggaggataagagtcatgatgccgctgtcctgtcagtgggattaaattaaaagaggtcctagtggtaagtgcttcctgcaggggctgacacgtggccgacatcagtggacaacagtcatgtcaatctgattgcaatgagcagagacagagcccacacccccagggcccatccctgccaaggcaaaaatgaaaaggagtaaaacctcccttatgtttgctggagacacggagcttgtatttttcaaaaacttccctggctttagagtgtttgtttggatcctaggctgggtaaacattcttcttagagtgttattgatttttccacatttagtaaatagtcttctgacataattaatcatgtaccatatttatagaaaacttggctgggctgaatgttgtttttgaggttaacttgtgctcacctcttgacactggccgtgataagcaaaggctactcaccagcctttggaaagagataaatcatggagggaaacagagttttcagcaggatcgggttcacacatttgatctccagggacagctctgagcatgaaatacaagtctctaaattatgctcacacagctggtgtggatgatttcaggttccatttgacattaacagcatcctcagtgattccagtaagttgtcgtaacaatttagccatatttagacaatataatttgatagaaataaaaatgatctatttagcctaacttgtcaagatctaattcttcagaaaaatgagaacaatgacatcacagttgtttgaaaagaagtcatttaatttgaatagataagcctgcttttccgggaaaatttaatttcctttgggaagctgactggggaattctgaagattcctgaggagtatagactacaactggaaaggaagacctcacaagcactggttgagaaccctccagtgctaggtgtatttaggtccacacccaggaacccttgggatgagggtttgcaaccagggagactgtccaggagcaggaggaagcgctgggtctcagcccagtctcccaaggccaggactgctgcctttgccttgccgcatctcagtgggcatccccaagctccactgacttagcacaagatgggaataatagcccctatcttctgtagtttcaaccactagtcaaaatgtgccacttactagccacgtgcccctgggcaaacaccgttcctctctgggcttcagtttccttacatgtaaatggtgtcacatccacagagccatgaggattaaatgagatgactcagtaaagcgcttggcatagtaggtggtaagtctgtggttccacgattagtggtatgaatacaatctcacatttactgaataacagttctaatgatttatggttattatttttgccctaggtgattctctggcagggaagtcaccaggaaccctccagaaggaagaaatgtctagcatgtcctaggtccccgcacccttgcaaagacccagagatgaagcaatgctggatagaccccacctgcacacagagaagaaaggctgctggagagacatcatcagaggagagagacagtggctctaatccaagaatccaggcaacgtgtgtagggctcagggtggcatgtgtgtgttttcatgcccagcaccaggacctgagcactgagagctttccctacctgccatgggatcctggtatcaaggtgttgcccgaaggtttcagcaccatgtggtcaattgtccatgcatctttatgccaatctatcatccccgctgctgggtcccagagccattcaagttggtctgaggcattcagggcttgccatctcccagtgggcacaaggcagctcccctgcaagaacacttcccagctttgatgacctaaccctccttgctggggtgcagataaaggacacggcaggtgcactacctctgtaaccctcactcaaatatgccagtctgtgggctcatatgccttgacctccaaagcacagacatgccagctgggcataagctgggacccctttggaggggagccagaagcattcagagccatcagcaaagcagagtctgcctctctgcagggagctgtctgtggagctccctgtgtgccctgatggtaggattcaatcgctccacagaaacctggaattctccctgttgtcctgaactgtgagaagccaagtcctgtgttttagatacaataccatctgaattctgctctcactgctggcccatgttctgtggcttcagccgagtaattccactctccagggctctttgtcatccatctgtgagagccagtccgggcagagaaggagaggagcagggcaagctgagaatgcagcccatgatgccgccccgattatggtgtttcctcactggacacgtggatgaagcgtgctcgggttttgacatctcataaagaatgagctgacagaattgggtttgattcagtcattttgaaaataagcgaagttgctttttgatatcctttttgtcgaaaatgacaaatagcttgcctttgtgtatacctgcctcgtttctcagtccggatatatctgtttcttaggaagtggggggaccagcaggaggggaggaacatggctgtctcatggccccagcagccagagaaagcccccaggtaggtgctggctgtgacatcaggtccccgtgcactaaaatagtggggagcaaggagcatgggtagggcacatgcccagtctgcccctggtgaaatgacagagaagagcccttcctagttaggcattcaaatcacgactggatcccccaatacacaaaggcgtggttgatgtttccatgccagatcctagcacggaaagctgttcacccaataagcgtccacccacgcccccacttctggcctgttccactgatgaaggtgcccgtatatgtatctgtctgcccatagtggggtttctttgcctgcttttattttaccagtggctacatttcatcatccagcttcatttcccatagaagttctgaatgttgtctggttttcctcgaaactatgaatcacactgtgcacgccctacctctctctagcattgtaagaaaagcactcctctgtgcaggacacaatcctgtctactgcccctgagagccctggttcatctcgtccctccattccagttccttctagaaggtaaaagttggaaagtgacctgagcccagtgcgggacaatatggcagtgctcttcaaggcctccgctggaacatcttgtgtctcccaagctggatgctgtgcctggtcattggagaaagtaaaggcaaagcctcaggacagcttccagacaccagtctcttcatcgggacgaggtcagctgctggctcccaggttgggtccagctcttcatcatttactattagacccacacagtgttttaaatatttcagtgaattgtgcatatttaagaaatgtgagattttacagaaagatttgcatttctggcttttctaaaaaaaaaaaaaaatcaaagtgtcttgcaatgctggcaaccagcccaacgtggcaatcagtgcctgcattagcttcctccttagtgccgccaggctggctcctgcagccctgggagcctcaacatcactaaatacctataacacaatagcctatgcatcttctatcgaaagtcatgacagttcttcaaatgaaagttagctgggaactatccaggattctccctataccaagcttgtccaacctacagctcaagggcccatgaggcccaggatggctttgaatgcagtccaacacaaattcataaactttctcaaaacactatgagatttttttggtgatttttttttagctcatcactatcgttagtgttagtgtattttatgtgtggcccaagataattcttcttccagtgtgacccagggaagccaaaatattggacatctctcctctttataaagcagggagggtccttctaattgtaacatcttatgaattcttgaagactctacaactgttactctcccttattcttcttaagaccagctccactgtgcacctgatgctagtaagcgttgggacgtgctgggagactcccctattcaggggacaaccctgacagatctgagcaatgatgacatttctgtccccagctgacacctggctcaggagggacctggctcaggagggacacagactggcccatgtggcataagggaaagttccatatgcttctgggaaagtcccccttgctcttaaacagagactggagaaatggccagcctgtcctctgagtgatcttctgagggctggtgtgcaaagctgctgtggtcaggacaagctggctcagaaaggtggcaaaaagagggcaggagctcgggtccccaaaagcctcctggaactgtgggattcaccaaacctgaaatgatcccacctgagacttcttatatgaaattattctcattcttaattgtttgagcagttatactttggttgttacttgcagccaaaagcattttctccagacttctgagtcctaaaaatttcattctttgacacaagagctgacccagaggccctgaagcccctctcaggcctgcagagctttggtctgtttgctgaatcagattcatatctacacaacagttctagggccaaattctgctctcccacactcccacccactcatattggaagacagaagagtcttctagctgaactgtttctggtgaaagagtagccttccttcgcgggcactgacactgagggaagcagctcagtggctacttccacctgcagatattccaggtggtggctcagaacagctgacaaccatacctggggaagactggcctttatttttctggttgttcatactccaacagctagcaccgtacgttggggtccaatgaagcgagcagcagtagatggcatggccagggcaaggcagacacgctggagcagtcgggaaacctggcatctacacccatgcactggcaccctcaccttcctgtttcccgtgggaacaaagtgggcggcaaatgcagggtgagatactgggtcacttcaggctccaacttgcagaagctgtttcagacccacaatgggagcaggctgcatcttttgcctactcaggataaaacgtgacactgctgcgtcatacagagatagttctgcatggtttcctaagaaaggcaaagccagaatgcccggggactaccagcattttacctgagtaattaccatgtgagcatgttatcttcaggaacaattttgctgtgctttaataatttatctctgagctaaaaaattataattgaaaatgataagcactttcacgagttgggttgccacactgcaaaaccaatttattgcacagaagattataaaacacatttccattcaactcagtctcaagtgatgggcaggttggaggggctacagaaccacagtagtattaggaaactgcacaactcgtataccaaataaaagcatcaaggatatgggggcagctggaaagcagccctgctctggttgagggttactgtcgacatctccctgtaatacagcaacctgattcctaaagaaacagatacagtaggcacttcactcaaactaatgctctcctcagcccagggcaggggagctcagccacaggccaggtccagcctcagctttgccagatccttgcacgggtcatggaggaggctcctggacccgtgcaaggatctggcaaagctgaggtccaggccagcacagcccagttctctcctcctgctgcagccaggctctcagcacgtgcattcacccccactgctttccatctgcccacttcttcattcatggctgtcctttctgcctctctggtgtcctggggctgctttcacgtcggcctcctctgacctctgcaggccaaccacatgggccccatcagtcctctgctccctgaccctcaggcatccctcctggaagtgtccagtgtgtgggcaccaggtggtccacattccctgggcctcttccctgctctggcctccacagggttccctcctgggccctgtctctctcctgcccaactcaccgctgctcggttgcatccactccccacatgtctcctactgccccatctcgcggcctcacagatgtgcctgtccacatcaggcctgtcctttcatctcccaatcagagcacccagctgtccactatttcccagaacatctcagagtcaccaagacccaaactactcccacttcctcccccagtccaccatccgtccagtgatccacgacgtgcaggcggcatccttcctcccaccttcccagcctctagggatgatctggctccatgccctgggccagtcctctttttccccgcccatgccccacctccaccgcctctcacatgggtgggcacagcactggtgtcctgaccagcccctggctccagcctcatcccctatgctccatgctgtaaggtgagatcatgttgaaatagaagcctgatcatttgttttcccataagcacacacaccacagtgaaatgctgctggggcttgccattgatcataggataaaaatcagatttttttttttttttgaggcagtctcactctgttgctcaggctggagtggcacgatctcggctcactgcaacctccgcctcttgggttcaagcgattctcctgcctcagcctcccaagtagctgagattacaagcatgtactaccatgcccagctaattttttctatttttagtagagatggcatttcaccatattggtcaggctggtctcaaactcctgacctcaagtgatccgcccacctcagcctcccaaaatgctgggattacaggcatgagccgctgcgccaggccaaaaatcagatttctaacacggccctgttagccctgggactttggtccttcttgttttcttttttctttttttaattttttttgagacagagtcccgctctgtcaccaggttggagtgcagtgacgcgatgtcagctcactgcaaccttcgcctcctgggttcaagttattctcctgcctcagcctcccgagtagcagggactacaggcacacgccaccacgcccagctaatttttgtatttttagtagagacagggtttcaccatgttggccaggatggtcttgatatctggaccttgtgatctgcccacctcagcctcccaaagtgctgggattacaggcgtaagccaccgtgcccagcggatccttcctattttcatgtccacattccccagccacagttctgtgggccacccagtccttccacaaggccaatacacacacacgcacacacgtgtgtgaacatgcatgcagactgagtgactgatgaactcttttaactgcattaggccttggggagctttgcccatctccccactgtagattcagcctcctggttacatgctctcactgcaaacctctcaaccttgctcctcttcctcccagaactgagcatagtggtaactttgtatatgtgaaattgatctcccaacagtaaactgtgagacagtcagagctggaaactcatccctcttgtctattgctggctccctagtgcctgctatagggagcaagtgatcagtaactacttgatcccagccatacatgggaatcacctggggtgggggacaaaccatagtaccaagccccattctggaccaactatatcagacttgctgtgggtgaggcgcacgcgcacacacacacacacacacacacacacaggtgattcttacaccagctctgagaagcactgaggttgggaagtgagaggtggagagcttgctagcatgaatattgatgtcacagcgtgaatcttcactgttccttgttcctttccccaaggccaaatagaagagtcccagatgttctaactagctttatttccccaagtgtcagcatttggccagcatgcctgaagatctagaaactgcagcttctctgccacatacagccaatgcttcaccacccgccttgtgcagggagagcaagcctcagctttgcctgtacactgtgctgtgcacaccagatccccagcataggacagtaacagcacaggcactgcaggggacttcagggaggcctgaatggccctggacccccagcccagacttctgtgcagaagagttaagagttattgagtgactgcaacctaaaggatatttcttctttaggtcatttaactacactaccagcttcttgaagccaggggctgcgtctcgtggaccttattgtctgctcagcaataacacagggcctggtgctttctgacgaatccacacacatgcactgagtggagctgcgctcacggatgagcacagctgcatctttcacggaggctgctttcctgtcagcttgcatttccctggatctctgtgtactgtggagtacagggccttgggctgagcccaaagcattctgagcaaagcatgcatgtatgggcatgtatgggaactaggagttctaaacgctttcccttaccctgtccccttaatcctcttaccaacctgcaagacaggtccttccacagtttcatgtgagatgagtaacggcagttttctcagctgttaggcaagctgatgccttgccaagctcaaacctggaagactgatgttgaagaagcaaggagggttgaaagagccatgagtgaacaaggagccaggagtgatggggagccagtagtgatgggggagccagaagtgatgggggaggagccaggagtgatgggggaggagccaggagtgttgggggaaccaggagtgatgagggaggagccaggagtgatggggagccagtagtgatgggggagctaggagtgatgagggaggagccaggagtgatggaggagctaggaccctaacttatacctggagtagaaagagtagggacatgaggaggagcatccactgaaggagtttatgttcctttttgacctgatgtgcctccagaaatggagcctgacagaaacgggaatctgcagccaaagtcctttgccctctcttggtcaggctttgctgtattaattccatgttcatgcaaacatctgtgcatgagtgtctatgacaactgtattcacaatagccaaaacctagaagcaacccaattatccttccacaggtaaatggttgaaagtggctcatccatactctgaaatactactcagtaatacaaagtaatagattgatccacacatctacctggatgcgtctccagagaattatgctgagtggggcagccataaccagaggttcatgttgtatgcttccatttatgcaataatcttaaaatgatattctatcaattctttcaatggagaacagactaatagttgtcaggggttaaggtggggtggagtcagggggcaagtgagtgtggttaaaaaaggacagcaggagtcatcttcatggtgacagacatgtgccgtgctctgcgacagggtcagtctcctagtggtgatagtgttccatagctttacaaggtactatcacaggtaaaactgggtaaagggtacatggaatctttctgtattatttctcataagttgtatgtgaatctgcaaatatctcaaaataaaatgttttattaaaaaaaaacaggagagattctcagggcagaagtttacttatacattgcataagaactagatgcaagtggctttgtcacctgttcgctgcagggaagtcacacccgtccaaagggccaccagcatccacctggatctcatgaaccaaaggccagtgctcattgcccagccccgcaaagctgaggtgttcagtggggccagagctgcaggccctgggaggggtggggacaagctttgtgccaagaaggtgcaggaagccatccagcagggctttgatggtgcagtgggcactatagcctctaccatcctaagaagatgctggaactgtcaacacaatagccagtcctctgcaggcgctgtctccagaaagttctgttaaaatgtaacacactacagaagcaaaggaacaccattaccatcataacatcagggatctgcagcacttcctgtaagagcctatacactaaatattctcagcttggcaggccactggtctctgttgcaactatttaagtccatctttgaggcttaaaagcagccatagacaatatgtacagcaatgggcatggctgtgttccaataagaccttctttacagaaacaggccgcaggctggtttggtccacatgctgcagtttgcccacccctcccattattttatatgatgtttttgtagtttgcggggcttgttggccccagccaccactgagggtgcatggatacctcttagcaggttcagaggtggacctctctaactgaagggaagcatggggcagctgagggccggataagagcctggggttctgggaagggtgctgaagaccagcttggatacccacactggccctgtcaggggtccttagagccagatgggaataagctaaaaatggggtgagatgttttagccctcagtattgatgtcaacggtgaaggtgtctgggtctttctccccctcatgccagctaagggtatgttaattcaccctgaatctgcccaggtcaatgttcaagactgtgcaccaggaaaggaaaacacttcatggagcaagaaacccagggctggcctagctatgttcctaacagagcactcactcctgcccagtgttgctggaaaatcaggggccgattgaaagcgccttccctgggttgtgtgacagtgagctctcaccactagacaatgggatctttatctgccttagggattttagtaaaggtgatctttcacagtcttgccttaaggcaaaatcgagccattgttctcatgccttatttcttcaaaaccttctgcccaggccgggagcagtggctcacgcctgtaatcccagcactttgggaggccaagacgggtggatcacctgaggtcgggagtttgagaccagcctgaccaacatggagaaaccctatctctactaaaaatacaaaaaattagctgggcgtgatggcacatgtctgtaatcccagctacctgggaggctgaggcaggagaatcacttaatcccaggaggcagaggttgtggtgagccgagatcgcaccattgcactcagcctgggcaacaagagtgaaactctgtctcaaaataaataaaaaaataaaaataaaaacaaaaaataaaaataaaaataaaaaaaccttctgcccagctcttgcctgcatctggatagaagactcctggagaaacaaacagtagaactcacagaccatgttggctaccaagttccttctctaaagcacacgaagacattgggaaatgactcaaatgccaggaaggaagtttaaaaaaaaagtggaggagctcatttaaaagaacaaaaaataatgacaggcaagctaaaataacaagaaaagatatgacatcagctcagggttttttttttcctataaatgatgccaactcccactcagaagagttggagttggagaatttttccttggcgggtaggggagggaatgtgtgcagatgctttctgtgaaggtgggataggtgacttcctctgtgcccggttacctcgcatatgtcatgcccagcagccgggggaatcttcaccagctgaacccatcacataaccagctcctagatcaagaagcagaacattctctgctccctagacccccgggtcattcccccaggctccatactccccgctctgacagcagcgatggtcacgttgggctgttgagcatccatgcatgcagggtgtgtgctctttgtatctggcgtctttgggcaattcatccgcattgtgtgtggttgcaggctgttcatctcactgctgagtattccactttgtgaatatgccacggttttgcaaatctattctgctattgatgagatttagatggtttccggattttgttgtgcatgatttgagggagacagagaagggcccaccactccctgtgatccatctgagttttctgaaaggcttccctccaggcaggttgctttgcaggcatcactctcaccccactgttcttagccaggggagttccctgaggggcctgcacaaagttgttatcgactccccgacactcaagcaccaggggcctttcatcccagcagaagggagaggagaggtaactggggcacgttttgcgccttcaccattgtatgtctgagtcatgatgtctttacaactcctcagaggtcctccgcatgcaattccctccaaaccactgacaggcagcctgaagacctggttaggtaccgggtttgggataaaatagacagccttgccctcaaggagctcacagacaagttaaaaactccaaaaccaagtttgattgatgtaatgccagaaaatgtagccagagtctggcatgcgagagtagcgattgagggtctctctcagggaaggaggggaaaggggtgtagcaggaaattagaaattagtagagaaatcaaacttgcttcaagaaatcttaagtgaccgactgcactagacatttattacatggaaagaggagtcactgagtaatggtattggtgtagaatcaagtaatgattgtgcacagaattctcttctctttgtggttcattgaattgttgtgacttttatataatggcctgcagaataacagtgcacctccacaaaacctcagttcagcctaaagggaggctttgttgaagtgaaaaggtgtttttgaattttcctgttttctttggtttatgcgctgagtgctgattcccatgtctggtgacttgtcactcctcgatgaacagaaactaccagagacaggagtgggccaagggagttggcgactgtgaggtgaggtcggggtcctggggaggagggtggagggtggagaaagaataaagaaagaggatgtgctggttaacattgagagttctgactaacacagagggtctctgtgctgatttgctccagataccacaggaggtggccctgtcagcctggaaccggcatcgggagtgcccgtgggaccatttgattgacactttgctcctccagttttctgatcagaccgtgacttttggctgtgatattgtccaggcctgccaaagtccactatggatgccaggttcagggacccattctgccctgcagttgacccttgtctcctgctcaaccctgaagcccctgcagtgtgtatagaccctggacccactgggctccagcactgcctgtcacacccctgcaagccaggtgaggctggctcaggctggtgaggaagtgcttgtgaggagagccagggctccatgccagggtaagagtaggaccaggaacgatgtatttggttattgacttttcctgcttcctgagctttataacaacacggggaagagggtcctgtgatcatctcaatttacagacaaggagactggggtatgtagagaccaagtttttgtgccaaggctgtgctcaaggtgagattcaaactccaggctctttgacttccctacactgcctgtgccgcaacctcgggagcagaaggtccggaaatgtggggcaagaagtcaggggccggggaaagagccaatgtggtcaccattctgctggaggtgggtctccaagtgtctcagctagcattgccctcaaagatgctcagcaagttctttcacagtaagaaatttcagagaaactccaaggagcttctctggaagagaacatctggggaatgtctggcttccatgcacccagcccagtgctggttgctagaatgcatagcaatgacctatgagcagtgggcccagcaaattattaactacagcttttcaggaaaaaaaataacccatttgtatcatttgcctctttccgtggtataaatacctccaccagggtcagcttcagtctcctcatgatgttgtggagcatggagcagggaggaggtgtgagcagcctgccgcggaacaggaggctccacagatgcagataaccttaagagcacacgttgcagtaaaaatcatcaggcatgcaggttttactatttattattttaaaaaaatataatttacttacctgtaggtttacaaagtttatttttaataatgactgtgtttaagaaccagcttgtgagattcctggaaatttcacaatctgctcttgcaaacaagcctaagtcagcccaggccggctcccgtacaccaccaggtgtgaggcctccagctctggaaatctgggcagagaaggggtagcatgaaaagaagtcagggttaaccctgtttaaccctggtgcttagttacaatgcctaagcatagaatgataaaaccttcaaacgttagtgtcaggggatgctgggcaatcactggttctacccctgcaggtagaatggaggatttcagttcaaccggccagctacgctccaagcctaatatggaagtccaatgttttcttctgctggtgtggtgcagggcacggatttcaggaagtttgtcaaattgtttattctatgagaatcaagagccaggatattgtgtcagccttgcctgtcagctgttgtttatatcacactcggctcctgtctctgggcttctttgcagggccagcttcgccttgctgggtgccctgccattctgctgtcagtggagcactgctgaccacaagaacaatcgagcaaaggctgtgctgggaggtgctggcaaagcccatgagagaaactagaaaaattcatgtttcatagacccagagcctctttagagtttcacgcacagaaggacctgccatgtgagcagtggggctgcatggcccagcctgagtgctttgctctaagctgacctttggggtcgtgcactgtagtaacttagggctgcatccatcctgcatgaggctgctttcctcttctcaaatattacttgtttaaaacctactttcagaaagacaactagattaggaatcgggaatgctgtgttatcgcaaagctggtagcaattttaaaatcttgaaagaagcttgtttccgctgtgagcctcagtattcaaatatacttgtttaaggtattaaagctctagctcactgatgctataagagtaaaaatggcaagatgtgaacagatttttaacactctgtgtgttaagatctgttagtcaccctcagcctcggcattgtccacatctacatcatctgctttgacctggagcaaacttattgactctccaaagacctcatttttctcaccttgacctggtgataacccatcacttggaaaagcttttgtgggttacatcagtttccagcaggcacatggctattagggggactcagcctcttggggataaaaagcaaagcaacttggagagttcatggcgccatggggctgcaggaaggaaggtagccctagccttcagccccagaactggctgcaggtgaacaatctgaagacaatcaagtccagactggatgtcagggtcccaggggtcatgtggtggatgattagagaccagagtttggaggagttatgccaaatccccggaagcatggaaatcccccacctctgccgaatgttactggattgtgagctccctgccctgcagctggtcagtgaggctcccacaaatcagtactgacaaatccacatccaaaaagcccactcatactttgtagctcttgtacattatttgtgatttaaactattagtttctctccctggtttaaagaaaggtgcttggggaattttggataactgaatacctgccatccctagatggtactcccaagtctatgagaaagggaggttttaagagaccagaccaggcctaagttgatctcttacactggagagtgtgatagagttaggggttttgtttgcatgcttttcagttgtgattttaaaaccacctacctttctctcacccatagtcttgatacttgatgtgaggaataaccagaagaagtcaaccctgctaacgtcacatggcagggcacacaagctggtggctgtgttattttccaactgaaaaatcatttataaatcattaatatatggattccaccaaggatacatacaaaaaaaaatggtttagatagaggagcctactcaaacatgctcaagcctgggtgcagacatagactcactcattattaaagcttaccctggaaagagccacgtgaatctttttgggaacaatcatcccatgctccagctggagggaaccggaggcctttttcttcggccttttgtttcacagatgcaaagaaatcagatccagaaaggttaagtgacttgaccatgttgaaacatccggttagcgacagaagccaaactaaaatctaagttgtatgtgtgtgtaagtgtgtgtgagtgtggtgtgtgtgcacgtaggtgcacaggtggaaaatctgtgtgtttttctccagatcctcgctcttaagagagtccattctaagacaatcatcttaattacaaaatcagtgttctgcattaatatcatgaaaccattattgaaacaaagtagagtattgtaccaattcaacaatagtagtatgattaggtaaactgtcatgtaaacacatgatgtgttatgcatcaattaaattatgttggcaatgagtttgtgcatatacaaggcaatgtttatctttaaacattcaagtaggagaaacccaagatctgaaactcttcagagtaacctcaactatatctaaaactttgcagaaacctgatgacctgcctgcagtgagcctctctgggtagtagactatggatgactttttggttccaaaaacatctctgtattaaagtacaattcctaaactggaaggaaaatgggaaggtgtaactagaagcttgcatgcgggctcctgacctggagcaatttggtgactttgcctgttttgcagctctggtcagcaccttggcacatccagggaccagaggttgcaagaggacctctttcttacaaagtcagcagttttgttccatgtctggcatgagttcagccacacaaggatggctctggggttgaaagtccccttttctggcttcctccggtgtgctttactgacctacctcagagaccacatgtggcccttggggcaggttctcaggcaaacgtctgccccactccttgagagagaaaatgggctcccagtgccctggactttgaattcctttgtgtttacttccccaaagcatcttgagaattcacaagcttctaggcttttgctgtgacctccagtgggtttagaatgcaccacgcaccagagaggagaagccaaagggtggatgcgatggtttccagccctggctttggcgtccagtgggaaccgggccgtctccccctgctttcccctttactgaactttagtgtggcttgtggtagaatgcagtcagttcaggctctgtggccacctgctgagtaaagactggaccctctcctgaggtccaggcaggccatgggaaatttgagttatgttcattaaacaatggcaatctctgcttttcattttcctgacttggagggacttgctggggcaggcaacacgcccaaggtatttgttagcaatcacgatatgttgtgtggtgggctcggccagatatgggaggaagctgaagtcctccatgctgctcaaaccaaggacactgcccaccgccccaggactgtacaataataaacaagtccttccactgaacactggggtgggggaagcagaaggtgaagctaattttaagtgtccaggaacttatttgaaacaatcttgacccaaactgttctgaagttctgtaggaaattgcatctgctatgaattgtggagttggagctgtctagaccaggatggagggatataggcagagtgatgggtatacgcaaatccatggaggagaggggtgccaggaccctttacaccccaggagggcacatgggaaggagggtctggtggagaggaagctgaagagatggctggctgtgggtgtggagttcagactctctccaagtgcgtgtgtgttttgggccaggctgggaggggcaggcgtgacttgggccagctgtcctccaagtgagctccccatagtagcatctgcagcatggaggatcttgttacaaatgaaagttccggccaggtacagtggctcacacctgtaatcccaacactttgagagcccgaggcgggtggatcacctgaggtcaggagtttgagaccagcctggccaatgtggcgaaaccctgtctctactaaaaatacaaaaattagctgggcgtggtggcacgcacctgtaatcccagctactagggaggctgaggctggaaaatctcttgaatctgggaggcagacgttgctgggagctgagatcttgccactacactgcagcctgggcaacagagcaaggctccgtctcaaaagaaggaaagaaagaaaggaagaaaggaagaaagaaagaaggaaggaaggaaggaaggaaggaaggaaggaaggaaggaaggaagaaagaaaagttcctacccctggattaatgtcctggggctgacaaaacaaagtaccacaaactgggtggcttaaaatgacagctctggagactagaagtctgagaccaaggtgtcagcaggtctgcgctcactctgaagcctctagggaaggagccctccttgctcctctcagctcctggaaacccaggtgtccctgggcttgtggccacatcactccaagctctgtctctatcttcccatggccatctgcccccgttatgtgtttacatttgtgtctctcttttctcttcttatgaggacctcagtcacactggattagggcccatcctgaatgtgcctgcctttgaacttagttacatctgcaaagaccctttttccaaataaggtcacatgcacagcactgggggttaggactgcaacatctccttttggggaaattattcaacttatcacaaactccgtccactgaatgagaacgctgggttttagcgagccctccaggttaagaagtgcttaacctggaggttaatgtgcctgtgtttttccaataaatgctcagagcctgaggcaattggagagcatgtctgtagtttgcaatatacagggttactcaaagtcaggcttgggaccagcaagagttggatccagagatgcatgatgttttagcagcaatgatattcatgaagctttttgcttcactccttgttatggtttgagatcccacagcagaccctgagacaaagacctggaggcaggtggttaacttgggaggtggggtcaggggaagggagatggggaagggagaggagacagggcaggtgcttcccgagactggtgctctgttgggagctggagcacagtctcgaaaggacaggtgtgaaacgtccaagagctgacctgccagcagctgcctcctgcccctcaccacagagggtggctgaagcttttatgccctggctctcccagctgccctgcacgggctgctgctcaggctaaggaccgagaagtgctgatgcttgagggactcatggtcagtgaggacaggctgtgagctgagctctgagctcggggcgaaccaaagatgggagaggagcatcagtgcccccctccccatcaccacattagaatcctgcgggaactggctgggttctcgaaggcgttgttatcgccctgtgctcacacataaggaccctgagacccagggccactagggtgaggcgacagggcagggcctgatgcacctgtcgaaatccacttctagctcccaccctgcccccagagacatgcgccccatgggccggcacacagcaaggggcttcggggcagggtgaaaaaatggcaaatacacacatttaagccaaaataatgaaatggccctggccctatcagcctcgaagctacatcaatgtcactttttttaaaaacgtaagaggagctgtgaggacatccagcccatggtcactccaaacctgccaccacagacagttggggcctccccggagtccgtgggccgaatttcacaggcgagcattcccaggggtcctcaccagctgacttagtcagtttgggctgctctggcagccccacaggcaggggcaaaggcagaaatgtgtcttctcacagctccggaggttgcagtttcaagatcaaggtgtgggtaggcccggctcctctgagcctcactccctggcctgcagatgcccctctcctccctgctccgcacacagtcctccctttgtgagtgtctgcgtcctcatctcctcttctcgtaaggacatagtcctattgcattagggtttcagctagcccccagggtctcacttaccttactcactgctttaaaggacttttctcctactaaggtcaagttctgaggtgctgaggtgacaaggtcaacaaatgaattttggggacacaattcagccagtatcacttacatgttctgattttcctccccaaaattctacatgctactagttattactatgcccattttagaaattaatgagatactcaaagaagtgcagtaactacagcaaaatgccacagctcagatgtctccagcttcaaaatccagaagacccagacagctcctccagcacaggaagccaggacatcagctataacagctgtgtggttcctgcaggtggagtttggccttgcccaggtccttggaggcacgacttctgtgtctggtggaactgtgcagcatggctcagacccacaagctgtgtgatggcttatcatccctgtgtaggcagggcatgctgagccaggctgactggacacctctgttcaggaagcattaccatcctaccagcaagagcaggtgaatagtttacatggtaattagccagcatgcactgttcccatgtgttcattcatttgttgaaaaacaaaataagacaaaacactccttcctggccctactagctccctggcttttctagaatatgctaagcacaggccacttcagaaactgtgagttcacctctccccctgcctggatactctttcttgtggtgttctcctcatagctcacacactcagcttctgcaggtacttgccccctcccccacattcccaggtcttacctccctcacctccccatcttccttcattgcactggtcaccttacagctctacaagagcagaggctcgcctgatgtgtgactaatccatccttagtacctagagcagtagctggagtatgcatctacgtggcaaaggtactacatgaacacatgggttcagagttcagcccattccacatgcatctgcaactcttcgtcaggccccagaatgcagcaggagtttgatacctgccatgggggcataaggagcagcaggcattgattgatggatgggctgccttactctggtttctgcaaataaaaataagaacaatccagtcaaggtagacaggaaaagccctgttaaatttctcctatcagcttgccactggaatcctgctgctgttgcagagacctggagacatggatggctttagaggccccagcaggcacaagacctggtgcacaggcccgagccaggctggagaatgactcagagggcagggaggatagaggaccaccagccatttgtcccgtgagttgcattagaccaggaaagccaagaaccacttcaactagttgaggaaagctgtgcctgttatgctatgtccttcagagagctttacatttttacgaagtccagaatagctgttggtcgtctcacagatacttacttaccctgctgcctcaacctccctccaccattcactgtcctgatgaaatcagatgatttgcgagcagagcaaccttgaggggaaatgacagcccctgagttcagtgtagtctcaggctgggcacagaggccaggcagccccccgtgggcctggggtgggctgggcactgggaaggaattggcatttgctctgcacctgctctgtgacgaggcacacacagtttacatctagggtgccactgcattcttacattttattttaactttacattttattttaaagaaactcaggcttggacagtgaaagagacttccttgtctgtgggcacacagccagccagcagcagaactgagcttcttcctgctcccagaccagcccttccccactcccccacaatctagaagctgttctggaagccgctgactgcctcttgtccttgagcagacttcctgaggtctacaccacctctctggttcctggagcaaggaaggcaggtgtttgtgtcttctggccaaggattctcaggaaccaagagaagggatggtaactttgacacttctgttttcagaattgctccttgttcttcccaccgcattagagcatcgactgctgcttcctccagtgggacccatcctggtgctggcaggttgctccaagtgtgggcaccgacacatgctgggcaaaccagcccttgaaccaagaattccatttgctgagtctgagaggccaggttctctttggagtctcagttgtagcctgtaacatttgggctctcataggccatatttcccaccgctgtccttaaatagtactttagtcagatcagataacattaccatacgctctaactctcctgtaactactaaaccgaaacatttacaaatatgataaaacaagcctagaacaccagaatggttcaatttaacacagtgatgtaacacaacaacaaaaggacagttcctggctaacaccaagtctcagccttcagagcgccatggggctcacagtgtaggttcccccaattccgaattactgggaaactccatttgcccagcagggcactgggcccatgcggccttcatatgacaaggaagtatcatttaacctgaaggactgcttctgggtcctttttgtttttgtgtggtttttttttttttctttttttctttttttgacagagtcttgctctgtctcccaggcttgggtgcagtggtgagatctctgctcactgcaacctccgtctcctaggttcacgcaattctcctgcctcagcctcctgagtagctgggattacaagtgcctgccaccatgcccagctaatttttgtatttttaatagagacgggtttcaccattttggccaggctggttgtgaactgctgacctcaaatgaccctctcacctcagcctcccaaagtgtgggggttacaggcgtaagccactgcacttagccatggttttatctgccacaaagaaaacggttctattgggccctctaaatggaagcatgggctccgagaagtcccagccattctgagttgcgtagcgggcctcccagtcccataggcctgacccctacctctttttctttattgccacccaaaaatgtcccatacataacataactgcagaaagctgattatcccaaaggagtcatctgaaaacctgagttctgtaaaacactgatctagacttttagatttcttactctttttgaggttttatcctctaactttttcttaactatcgatgtcacctggaaagtattgtttttaatgcaacgtgtcataataatgaaactaaaaaccatcaacttatctctactaatgtaatttcaaattccaaatgaaaataaaaggctatccaaattgataaattcttctccaataaattaattacttatattaatctcattaatttgactagaactcagttttctttcaaaaaatgtctgcgtctttattgttgcataagagtggttgactgtagtcatttccccaaaagttccccagaataaatataaaaaacccagactgagtgaatttcaactttcgagttccatgaggttgttctcttggctatgagataatttgtagtcagggctatggtacttctgagaacccacacagatgctgcagctctaaacccaagaagcagctgcagtttctttctcacatgattacatttgaaggtaatattgtgcaatttacaaagaagggaaagctcagagaggttatgcaagcctcccaaggtcacacagtgaatttataggttgggtcaggactcaagcttaagtctcgggattcctagttcaatgtttttaccttggctaattaaaggctggactgacagaagaaaattatttcgaacaagcagctttccttatttccaaaatcctgctttgctgctggagcccccaggaatgcatgggaggctcactgcggatgcagttcctgcccctcttttcacgccagctccacatcttgagtcacagtcatgcccactttctctggcatcataggtcttaagcaactttttctactcacgtacatgttcataccagggaaattttttccatgcatgcgttagcctgcatatttacccggaatgtgcctgttttatcttctgaaggcatcacagcagggtggtgaacagtgtagcctccagggcccagtgatctgcttcaaatcctggatctgcctcttaaatgctgtgtgacattagacaagtgattcaacgtgaatgccaggaaagcctggggtcacactgttccccaagctgtggctgtcagcttccaaaggctccagcctgtctttggatagaagtgtccagttaaggatgcaagtgaatgtggcttatctggagaggacccaggaggcagccttcaggggcagggccgtgaagcagggcagggtgggaggagtcatgagctcagtgggtgcgtgagcaggtggcctccacaaacagcagagctccatcctgctgggcaccgctgagcatggtctggaacacacctcagagtggtccctgcaagacagatcccctccaaatcaggctgctgctctctgtgtatcatctccctcactggcccacgactcaccatctggccttgggttttagaccctggagcttttttctagtctgtctctcctgctaggtcgtgcatgagtcactcagacccaatgccacacagggcaagctgtactgggcttggagcaatctcagatccagaccagacctttggaaaatgggtgactttgaaccagagacttacctcactggagccagtttttccatttggaaaataaagaaatttgaccagatgatctctgactgtgaaaactgcaaagcccacctttttgttcatatttccaaatcctacctgtatgtgttagcccttctctctccattagtgagggtctcggccgaccttctgcactatttctgcatgcgtggggtggggtgaacttggcctgagcttctgcgaccgcattatcttccagccaggggtggatgctctgtggggatgcctttcctggagatggccacagctgaattccaaggctcagatcacgggcacacagttttaatttctcaatcatctcacctcaggcatttttcttttctttcaaagtttggcctctcagagtccctagaggtgaggggcctgtgactttattctgtgctggcatttgaagagaacatgaattattttaatgatgatcctaggaatgttgctgaaactacaagtgaaagctcatggtcaggcatcttccgggagcaaagtggaaatggctgggctgcacatgctagggcggagcaggccgcagcatgttcaagagactttccatcaagggatctggtattttgcagacatggctttgtttgtatccaggggtcttacgaaaaatactcaccaccgactgggcacgagcacccgcccctcagaacagaggctggagccggctccaagcccttgctgggttgtagagagccctggaggaatgggaaccctggggaggggtcaggaggcaggggacactctgggacagcgagcagcagctgcttcccgccagcaggccacacgcatgcctaccagggcacatcagccataacttctgaatggagtattcaagccctgcccagacctcccttgggccacaatttaacaaaaaatattccctagcagtggctgcatgccactctgtgttgtaccttgtacctggtggaaggcagggcctgccttgccctggcatggggcctgcaggctttagggcagacatcctctgttggagtggtgggcaaagcagagggcaccctggctgcattaggtgggaagtccggtgaggcagatgaggggctggtatgaatggcaactcacttgagaaattagaagcaagaggcctggagtgaatatatcgtcagtctgaaggtgaccagcggagagctagagctctaacacgagcgggcccttggggaaatgcccgtgagaggacagcagggggatgccgcaggaggggcagtccctgagcccacgctgacagaggcttttctcagaacagctgcagctggggtctgggcaggaaggagctccaaaaggtgtccctcaggctcttcactctcttctcaggcacccagggccccctgctttggaaaaatcaccccacactcattcacactagagtttaaatgactttctgggtaaagagtaaaatgccgcagcccagtgaatgaaattctatgtcatgatgaatgcatcagcaaagaccagcggggagaagagtttgatgccaggaagcttggccctcaaatcactcacagccctaggggagaagctggctttgggaagaggtgttacaaacccactcatgaccgagcctctgaccaagaacccttcgttgtcaggtgttgctgtgtagcaaacctccgcagtcctcagacacacatccaacaacatctgctttactcacaaatatgccatctgggcggggctcatgcaagctcctggatccctcacccagcatgtgggctggagcagccgaggctcctcaggcatctctctccatctccctgtggtcttgacacatgcactctccagcgtggcagcctcagggtgctggacctctgactgtcagctcaacaccatcacccgcagcccatgccccgagagatcgggcagaagttccatgccctctacggcctggccttggatgttgtgcagcatcacttccaccacagtttgttcattgaagcagcacaaaggtcccccgggggtatgaagggaggggacacagtctctgcttatgatgggtggtggcgaggttcaagaggggcacgtggggccagaaatattgctggggtcagcgttgagtaataccgtctgccaccgccttgttctccattgccaaaacataaaacaccttaaaccctccctgggctttcccacatgctgggctgggtccatgctcctccctctcctttcaaaagagtggtatttgtaggtctatatgcaagcacatagccagtctatcatctctatacatcatccctgatttgacagtcatcccaaaatgtcattgttatggtgtccattttgaagatgagcacactgagctcccgcaaagccaggtaacttgctggaggccacacagctagagaagacctgacctccagctgtgcgacagccaaggctacactgtttggctcacatacttccttattttgttccgcatgagaaaaagggcagaaggagccatgtggggtcactcaggagactgagggtgcaccagaattctgcaatgggggtgacctggctgttgggtccagtcctgtaggagtttcccgtgctcactcctgccctcaggctgcaaatgcgccttgagtgcccatacagtgccagacccttcttcaggctctggggtccttcaggaaagggactaatgcaccccgacttcctggccctgcccctctccctccagcctttttggtaggtccacccattttaagcttccttcctgtgcctggaacaatgacatgttctgtgctgagtgtacagcccgagaagtcccaaccatcacaggccagagttacagaaactgaggatctgttgggagggacgtctgtctacccagagccaaggcgctcattgttcccacatctcctagagctgggctctgcgcctctgccctgcccaggcctgcctgccgcagcccaggcttaccagctcccagcctgcaacatccttgctcctgagcccgctgcttccttgagcactggtgttgaggtttgctagagccgttccatgctcttcacatccccctagaccccgggtgctgcgtgcaatgacatagaggaggttggctgggaccctccctcagcaccagatccacagatggatgagtatccctagggctccctcaactcagcatggctgagcctgattccctccggacggtccgcacacaccatgtccccctttcctccacctcctacacttcagcaaaccccatgccttcgtccatccccaaatgtccatttcttgccaccagcactatgccctcctccccagaccaccccagtcccttgcctaggctgtggcagcagacacctgatggtagcccagttgccccttgccctgtgtggtgtggctgcagagtgacccctttctcagtgcaaatcagatactaagacacccaaagtaagacctcccctggcccgctttacgctgcagtggccatgcttctgtcctcccctgcatggccacaatccggtcctctccctgccctttccttccttgtctcaggtcagctttgggatggggtgggatggggtggagtatctgcaaactaagttgagccccaagcacctgaccatacacagagcaaagactgcagggttctttctggcctctgggcccctgatgtctccaacttgagccttgcgagggcaggttccagtttttccaaccttgcctttctcaagaagggttctgccatgattcacaactgcccattgaaggacaaggttcccagaggctcttccactgcctcctgcttggctagggagaagcacgcgtgtggggagaagcatgcgtgtggtggtagccgacaacttgtcgccagcagggaccctgggctgggagcccactggttggttttgctcaccttctgcacagcacagctattgcagggctggcacaggagagaccctcaggagacatttgctgattaaataattgactcccatgacactcccaactccttagggcacactctcttctcagccaccaccccccgcccccagccaaaacccgctaactttgtttggattccaccaaagccacagtctgggctctgtcctgcctcactctgtctcccagcacaagcagcctagacctcaagcaccttcctagagcaccgacttcttgcagctttcaggacctgcttctggtttcctcctaccctgcaccccatccccccctccatctctcaagctgccccttatcttgccagatgaggaggttcaccacagaaatcagcagatgaagaagtagatacatgagaaacttgccccaaatccaagaaagcagactttcctctcggaactagccccctgcgcctggatgttgtgcggcaggccttgtttctgtcgggcagatggctcctgggttcctcccctcctgccccccgcatgccccgccccacccccaggactgctgtcaccaggcatgtgtatccacaaaaagatgcttgcccagcgcccctgtgcgtcccatgcctgagcaagaagctgcacttcctcgggcctcccagctctggaacctgctgctggatgcctcttatctgaattgtgactcctcaagagataagagcctttttcttaacagaaaggcaggagtttgaagccttctgtatcctgcatctctgagctcaggcctcccgagaagcaggagccgacttccagcggagagcactgctgctgagacctgcctggtggtcagcttgggctggtgagccagggccaggcacaggatggtgggggtggtgggggctgcagagggggagggtggtagcctggaggacctgctgggcttgcaggcccccacctgtcctggggaactgagcagaggtcacgacggcaggacaaagccccttctgagagaaggatctgaatccattcctcgcttccaggttgttgttatttttgctgtgcttttgatgacaccagcactgcctctctacgtacagctgattagcaaccctgatgatgacatttacggggtgttcatatgtcaactagagcatctacgtgttcctgtggttttggagcaagagtgatttgagtttcagagatttttactaattcttcttcccctaccagaaaaaaagatcttaccatttgagagtgagatgtaaacccagccctgtctgacctgagtctgtgccctaagcctatgctaagccaagcagtgcctggagccaccacaggtccacacaattcgttaacatgatgaagcaaggatggaaattggacaaaatagtgtgcctactgaatctaagaatgaaaaatgattgcactcctactctgagtgctttggagcactgcccagttgggcaaagggtcagcgcctgggcagaggtccccacaacctggcaggagtgtggtcggccaccctatgggcctccatcatgtgcagtgacagcggggctgtcatgtcaccgtgtgggagggcttgcaggtgaagtggtctgggaggggtcccccagacaaagccaaggttctgagagttggcccgaacactgctggattccacggcgggggcttgggacagccggactcagagacagtaggaggtgacaatgtatatacatcacaatgatcacaatatagccccacacgtgccttccccaccaacagtcagcttgccatgtcccttccccgacatccccatcttagtcccaacacagaggctccctctgccctgtgtctgtttagccaggatgccacggttcttcccccttctcccatgtcctcctccacacacccttcaagggcaaccccagagatttctcctccatgatttctaaagtcagtggtaaatctgttcctctttaaaatctcatcacactgttcaccacttcccctataatacagttccgcatggccacgtcatacaaccctgtcatattggtgagcaattgctgtgtagccaaagaccccaaaactcaaacagcatttattattattgcccccatgtctgagagtcagatgtgcatttgctgatctcagcttgtttgagctgctgcagggttggggctctgctccaggcaggcttagctgtcaccacatgcacacatacattctgggcctctgctgtgcgcgtcacgttcactgaagatcttgggattgggagttagggcggtgggagggcccagcaaagtcacctggcgatggcagggacacagggaggaatgtagaatggggccgatgatgggacccacacgtctgcaaagctgcggtctccttgaggggtggagacagcaacaactcaccgcacgcggtgcttcagttcaccatctccctgggacattaggggtccccgtgttatctcattttgctctggtttgcattagttttttatcacttcgtagatgaagccactgacacccagagagggaaagtggcctgaccaagggccacagcaggggagcgaaggagccccacagtccggcaggaacacagcctctccctggctttcaggttcactgacatcttctcatggcctctgtaactcaccaggcatcagggtgtagtccttagaccagtgtcccacagctgccacagagtgggagctcaccatcagttataagtcactagaaaggcttttggacattataagctacaatggaaaataagtcatctgtggatttttgtgacagattccaaaaatttgaatattttgtctacttaggtttttggttaattttatcctcaaaactgttctgcagtgattaagctgtacaaactgcaccatgggcgaattggcatattcagaaatgactgatattcttgatttcagttttttactttgtatgtagctcctcaaggaaacatcatgtaacttgattccctgggaaggtccagtgcatggcacgcatgggccagaggccactctcctccatccgtagaccacacgtgtggacaagcccccagcatgcctagaggagcaaggccagggctgtgcatgctgaggcgcccgtggccagtgtcaacaggaaaaactaactccgccagttgtacacgtcagccaggtgtggggtcatgcatttctcaaccctcggggactcctcaggatgggatggaagatgtgtaggtagattttgaagaaactgcagatggtgtttcagagagacggtagaaccatccatctccactgtagcccaggaataaaactgtgcagcttgacatcccctctcccattcaggaataaaaaggaacaaacaactgatacacacaacatttgaatctcagaatcactatgtggagtgaaataagtcagatacaagaacatctgtatgattccaatcacatagaatgaaaattaacctctagtggcaaaaagctggtcaatggtagcctgggcccaggagtgagaggggcctgtctgccaaggggcacggggaactttaagagggagcagagatacactgtggcggtgctgccagggccccttaataatgcactgtgaatgtgcgctttgtgagacaaagtagtaaacataggaaaccacgtttgctcatttgtgcttggcagcagaatttcacaaagtgcctgtctctataacgatgtgcagctccccagaaagatgctctgaagacaaaacaggatggagcacacaccctctccggactcttgcctgagtcactatattctttgcagataaatggccctggtcttaccttttcctacacgtaagataacatctgacagggtcagtgattattgctctgtaattgaatccataacctgatgcactctgacacccaagctttcatgtgactttgcacgtactggacctcccacctatatgtcaactgtgacctgaaatacagaacctcagtggaggctgctccagggctctacgccacagcctgtagtcctcggtaagcttctgaagaagacgaactttaattctttaaaagcttgacaataactttaaatggatatgatttattgcctgtaaattatccctcaataaagttgataaggataaaaagaaaaactctgtgatctggacacagaacgagcagccctgggttatctttgcattctagaaggggcctaatatttgtgttagtagcaacagcagtgatggctggaagccagattgtgcttacttgcaccaggtgctgagctgggcactgtatgcatcggaggaggggcatggtggcatgctaatagacctttatttacagtaacaggcagtggggtgggttcggccatggacagaggtttgcagacatcccaagttaaggcactctggcaggtgtgcctggcgggtcttgggagctgggcctccagaggtttgtgctgacaaaaaggccaatgacccctcctcctggcattcttgtggggatggatgtgatggggtgtggcacacagtgatcaggccaggtaacggtgactgagacgcagggaaaaggtgtttcatttaagaagggtcgaggtcagtctcccctcagacccagcttcccttgagccagctcagtccaaagagcacgctgcccttccttccgcacactggagcacgcagccctggacccacatttctcaacaggagcaaaaaaaggaagtcgggaagagaagcacaaagccagtgagtgaggactgggcttgcagcacccccaagggctccccagggagagggtggttagaacatctgtgagattgcagtctagggtgactcagtggagcaactgtcaaaggtgctaagctgggatttctcaaggcccatcttccccagagctcctcccagccacagacccacaaagggcctccctcatgggtctcagttacaccagcttctccccacagcaccaacaatcctgtcagcttcttcccaggcagcagcaggcctcacatccccaccaaaagggacaccattgtgatagcctgggctgcagagatgcacgccctgcagggacagctgtaggtcttggcacagatacagtggcctgggctaatcttgagctgggcctttgcctcctgggttactgatgagaagctctgaggctgaggccagtggatgccccccagacctctccactctccccaagcacccaaggccagttctatgactgtcctggtgagtgccagatgcagggaaagtggccccctgtgtggggcaggtggcttctgcatttctgattagggggccaggaaggaggcattcaggagaaaacaccaagtcagaaaaaaggttcccaggactggggacgaaagactcagaaggaggggaaagaggaagaaagctgtaggggaagggaagggagggggatgagaaaaacgctggggaacaccactgaagttacttcaagctagcaacactggacgctcaggtcttctgttgcatgggttaccgggttacatgccaagggctcagtggctgcctgtggctggtggctcctgtacgggacaatgaagatacagaactcgtccatcatcacaaaaagtactactggacggcactggcaaagcctaaccacatgtaaactttactcaggacatgaggggttcctggccttccgcccccacccccgggagcctggggccttgggtttaggctgtcactcaaacccagggtctccccacctcgccactgtgggcatttgtggccaaccactgcctgtgatagggactgtcctgggcactgtagggtgttgagcaacaaccaaaacctatcagatgtcacccagtgtcaccctgttgacagccactgctctaaatggaaacaatgtggctttggggtgaaaggggacctgggggaagtctggatctgtctccagagcttggagctcccgtgggcctggcagacgctgggggtccagggtcacaggctgaacctgagatgttccaacaggaggggcctgcctgagggcctgggctcagaaatgagggggcaggagtacatgcagaggggacccctgcctagggagctcaggtcctgccttgcagggacctgaggggccaggctggagggaagaaaaactagagaccagaagattctagaacaccagatacagctatagcagaaggcaaggggacttagagtgatttgggcactaggatcagggctgatgcgggagggcaggcaggagtgctggggggttgccttggtggggttcggggaggggactgagctggggtcagggacaatcaagaattcctggagggcagcaaagtaaagaggttaagctgagaggcaaggaggcatcaaaggaagcgaagaggtggggaccaaggggaccccaaggagtcaggactgagggggctgcctgagtgggagaagaaaggagtctgggccacaggattctgaggaatctcactcctgagttgggaccagtgggagccatgagcctgggaagaaaaggggccctgatgcggggccaggcctgggctggagatcagagccagcaggcctcacggagcaggatgtgagcagggggcacaaaacgcagggaaacccaggggctgtgggccactaagggctggggacagcacatcagggcccttggcctggccgaagcacagccaggaggtttaactccaggtggagtgggcagaggttggtactcgggtcacatgggcatggcagttagtacatggacccggagatgcctggactggggcctgggcactggaagttagaatgggggactttggtaatggggattggccagggaggagctggcatcgaggggccacaggagacagaaactaggcaaggcagcttgacctcggcccgctgggaatcaggggtctaggaaaaggaggagtttggcgtgaaggtgagaggcacgggttccagggcacatagcccttgtcaagggtgggcccatggctgtggaagggagtgctgtggattattggacactgggcagggagaggcagggtccaagacagccaggctctgccttggctggggcctaagtaagggtttggggacccaagagaggtctgtaggctggaaatgagctggacaggccagagttacagggcctaaagcctgggaacagtgaccgggctgagggatggggcaggctggccctgggaggccgaggggtccaggggttccatgcactgcaggtcaccctgctgcatggatagatggtgaatgtggttttggcatgggcagtggcacagcgggaagaagactgtgaagccagcagcagggacagccacgaaaccctcagcctgctcagcatctccccctttcctccgtcatcctggttggtggcagcccctccgcctcatctctgcatggggtgggggggtaactttatattatgaactaatcatcatgagaaccccataaggaagaccatatggttatcccccttgcacagatatattgagtcacttacccaagatcacacagctaattaacaccagcgcctaattcaaactcaggcagcctagttctgaggcagcgctattcaatcaatatgcacttagggaacaggcggccaggaagtgcaggtgggccccacccttacccctgctctgtgctgaggccgctgccgagctgtctattcagagtcagctcctctggtgctggaagatgctggcactcagtgctccatcgcctctcagtgagctgatcatgacaggagaatgacagaaaatgaccaggtgttgccacccaccactgtgaggctggtggtccctgtcccttagagagggcgagctgggctcatggggatgcagaggcagctgccctttcccactgggtgaccctggtggaaatctgggagctgagggtgtggactgcctgcagggaggcctcacctaatacctctaataaaagcacccctcgtgtgccgggcactgacctggaagttggagtgactcacttgaggcaccagaaatgctcgctgcagtgcagatgttaggacctgggttcagaaagcagatccctaaatgagcctctggggtccacggcttctggtccacgtgcccacggcttggtgaggtctgggaggtctccctgagggaggcaggacttgagtgggaccgtgaagggcagaaataacctgaaaagtggggacaaggcagaggatagagaaatggagggagggaaggcctcccagggcacagtccttctcggaggccccgagacatgccttctccccagttaccctccaataaagggaatgcagcaccacaagaagactcagtggcaccatccctggctgcagaggggccacccagctgctcacggtgtcctcactccattctcattctttgcctaatgctgatgtctcgcatggaatatttttcttatctactttgataagacatggaggtcagaagaaaatagttctcaaaccagagttggcctaaaacactacacaggctgtaaaccacagatttccttctgcataccatccctgcttcctcttcccatctgactgtaagggaaagcaggaactccagaaaggggtctttgtaacacacttccaggagatttttctgcaagtggtctcaggccacacttcaggaaacagactcagaccatcagcactggaaggaatggtggagtttggccagcccagtgtttccaactgtgcggataagacccctgccgggatgaccctgggagaagaggtgagggtgagcaggtgcgtgggtgcaaggccccttctcaacccaggcaggtcaatgttatgtttatgtgtttttataggggcttctggtagtattaggtataagaggggtttcaatgcttttaaaaaaacaaaaaggctgcaaaccacaaatctcaccctacagtgtcactcatggacagggccagccgggagtgtgagcaagacacagggccttgatgtcagccagactgtggcctgggcaatggggttgaactttcctgagactctggtccataaaaggcagataacaccttccaccttggcctccaggggacaacccataggcccccccggggtcagttcccttccctagtccaggaccaaagggaagccatttcccagttcctggcccaggctcagtccaccaagtatggtgggaaggcagaggcacggaaggctttagcggtaccctccaggtgtttggggcatagctggggtacagcacgcagcctgagccctgttgaggctgctgagagctgacagagtgggctttgcagggagacagacacggtgggcattctgaggaggtggactatagcagcaggcggaagcagggggcctggaaccaggagtggaagagcagaagagtttcgaagcagtgcagccttctgctgggtgttttgggtaattctgaagttgggcgtggacaggagggatgcatgaggctgggcaccccacacagacatggggcctaaaaatgctgggaatgagagtcacatcggaggaccctccacagcccccggcactcatccaggcagtgatgcctccagttcacaccctgggtggggggcaaatgttagtatcgacctccctgaaaagtagcaaggaaggcttttttcttttttttgccaaaacttgcataagacttagaaagttccaaatggctcttcttgcttatccagcgcttttggctgcctgtgacacactgtccctgaagcaccaaaatttcataagagctgaggataaaacccaaagagggccactctccaagtcacccaacatcccagacttcacacttcacagggtgaaaagaatgtagtcttctaaacatgatgcaaaggtgttagcaaactcagaaggtctaagtcacagcaagattttcttttattccacttccctgccaaggatttcagtggaacaaaataaaccagacctccaaacagcacgactaagtgtgaaagattcagttatctttaggtttcttcaagcagtatttggcaagccgctgtttttggatcacgtattttccacaataagtcaatagatattccattcaaaaaaagaagcaaaatgagtttgaatgttttgtcaaattatgcttgagcatagctgtatacttaccctggcttggcaattaaaatatttattagcatattaaattcacaaacaactataaataaagaaacctggtttacttaaaagcagtgttgtccattggaaaacatggcatcatgctatggattgagtgccctgtgtaatccgtagagagctcactctggatgacttaagctatatttgagcactctgattttccgtatcttgatccagatgtttgacatctcaagaggcatggaggcctggtgtggtggttcaggcctgtcatcccagcaatgtgggaggctgaggcaggagaatggcttgagcccagcagttttagaccagcctaggcaacaacctgagatcccaactctacaaaaaataaaaaaaatcagccaggcgtggtgcatgtgcctgtggtcccagctacacaggaggctgaggtgggaggatcgtttgattctaggaggctgaggctgcaataagccatgtttgcaccactgcactccagcctgggtaacagagggagaccctatctttaaaaaaaattataatgaaaaataaaaaaataatttaaaaaagggcatggtgtagcctgtgctactgaagggtcctttatctctgtcagccattcctaaagtccactagagaataacaaaatattctttttccaccaattggtatttatttctgtgataactgaagaattccgccacacaagcatcacccgggtcagctgccacagacagtgaccatatttgtgaggcttacatggtgaccaggagcttaaattgacctcagacctcaagaatctcctgataatctgaccacgattaaaacgtggcccacaatcctttcagcacgtgaaatgactggccaggctttccaagaatcccaaagacttcagcccaaacaagaagctgacctcttagaccagcagcagatcatcctaccgcggcccttttccttatttgttaaggccccgcttcttgtcattatatcgtcagcacgattattcggtgtgttttctggttgtgtggtttatgcactatttatttcctgattcttatctttttctccaagaatagcagcacagacatcaagtcaatttcagcatggatttattctgcctggaaggtgggtcccagtcacactagtacagaggtgacaaaatcatgtgtgtccagcaactaagtccgcaacgcagtcccatttagtcctcagggagctcatatggcagaaggacttgtttcccaggagagggccggggcctggagcaggctgatggattgctcctccagcagctgcagaactgggcctaggaccggggctcactctaccactcatctgccccgtctccattagcacctagcctcagaacagcatttatgaagcacttaccacacatacccaggaaaggctcgtgttctgcagtggttaccttacaattcagaatgaactttgaacaaatccctgaagacaacgaggctggccgtggatgtgcagctgccttgcgccttagtgtgtcatctgtaaaatgaggtaatagcaacgtatgtctcatgggttactactgtcagagtcaaatgaggtaattgtaggtaacgccctttgcacagtgtcaggcacaccatgagagctggaaaagcgttggcttttaacattcctcttattcttcctttctgttttctgaatttctgggtttcatatcgaagtgtgaagagggatgagtttcaaaggaggtagagagtcccttaagctaaaggttttcctttggagggctgggggccaagaacacgagaaccttctctatctgcagggcctggtcttgcttccacattgtggaaccaagggccagcagagaaagatagagactaaccccagccccaggccccagaggtgggggctccaggatcacaaagaccccagcttggctccgcctctctctttctcaatgcatgagcagcagcactgaggggactggggcttcctggaattttaaaaagggtttttctaacaattcctggaactgtgaagtcagtggggaaggtcatgggtggagtgaggtcatgggcctagctccagaagtgtgccgacagataaggcgccttggtctggggctctccagcctctaacgcccagatggcttccctctggggctgcaaagtttacaggagagaccagatgatggcactgacaatggagggtgggtctcctctacacttcccaccccaatagctgcctttgccctagaggggcccagacacattcgttggcagtaaaagcttcaccctccagagcagaaggggaggcccacaggcttctccctgaacttcatcatcccagtggatgcagggtcggggtatttagggctcttttctaaggagctgcattaggatctcggcacatttttttctttgttaattttgtttatctatcaattcaacttatttgggctaaggccagaaaaagattagctgggatttagggagcatccgtatcagtttattgtgactgtattatgtaggcgtcattgatacgatgcaaactcactttaaatgccaacaggcatcagcaggtggagatagtaaggttagcgcccttcactagaaggcacagacactggttagggagggaggaaggcagagccagcagccagctcctgtggtgccggttatcaaccggttatcagatgggtgctgtgagcaactgatctccctggctatgagtctgttctggaaaactgcggcctaaccaaggctgtcccgggctcttccagctgctcagagggagggtcctaagatcttacagacatagctaggtcatgcttcccatgtcaatcagggcaaacagaacacactaacagtgaacaagtccaagaggggattaagaaaacaattctatttacaacagcatcaaaaagaataaacatttggaaataaaattcaccagcaaggagaaagacttggacaccaaaacattaaaaaaataccggccgggcgcggtggctcacgcctgtaatcccagcactttgggaggccgaggtgggcagatcacaaggtcaggagatcgagaccacggtgaagccccgtctctactaaaaatccaaaaaaattagctgggcgcggtggcgggcgcctgtagtcccagctactcgggaggctgaggccagagaatggcgtgaacccgggaggcggagcttgcagtgagccgagatcacatcactgcactccagcctgggcgacagagtgagactctgtctcaaaaaaaaaaaagaccaatgaaataaattaaagaagaaataaagaaattaaaagatttcctttgttcatgaattggaagacttaatattgataatgtgtcaaaactaacaagagtgatctacagatgcaatgcaatctctatcaaaatcccaaagggatttgctgcagaaatagcaggattcatcctaaaattcatatggaattttaaggggccctggagagccaaacaatcttgagaaaaaaagaacaaagttggaggactcaaacctcctgatttcaaatcatattacaaagctacagtaggcaaaacattgtggtactggaataaagacagatatatagaccaatggaatgaaatagggggcccagaaatacacccttgattttcagcaaggatgtcaagaccatttaatgaaggaagggtaaaattttcaacagatggtttgggaaaattggaaatacatatgcaaaagcaagaagttagaccttacctcatatcatataaaaaaattaattcaaattgatcagatgcctaaacataagacataaaactataaagctcctagaaaaaaacatagaagaaaatctttataacattagatttggcaatgatataacaccaaaaccaggtgctgcaagagtaaaaatactaatagataaattggactatatcaaaattgaaatgttttgtgcatcaaaggacaaaaaatgataataaacaataataaacagagtgaaaaggcaacccattgaatgggagaaaatattacaaatcatatatagaataaggggttaatgtccagattatataaagaactcctgcaactaaacaacaacaaacaacaacaaaacaattaaaaaatgtcaaaggacacgaatagacatttctacaaagaagatatacaaagggtcaataagcacatgaaaagatgttcagcatcactaatcattagggaaaagcaaatcaaaaccacactgagataccgcctcacatccattaggatggctactattagacaaacaaacaaaacccaggagtcataagtgttaatgagcatgtatggaaattggaacccttgagcaccattggtagaactgtaaaatggtgaagccactacgggaaataatatggtggttcttaaaaaaataaaataaaattagaataaaaggaaaagtagaattgccatttaatctagcaattccacttctgggtgtataaccaaaagaattgaaattagtgtctcaaagagacattggtaaccccatgttcctagcagcactaaacaccatagccaaaggtggaggcaacccagatgcccatcagcatgtgactggtaaacacaatgaggcacaaacatgccgtggaatattattcagcctttgtaagggaagaaattctgatgcaagctacaagggtgaaccttgaacacattatactgagtgaaataagccagtcatgaaaagacaaataatgtgggattcctcttaaatgaggtgctagagttgccaactccatagagaccgaaagcagaagggcggctggcagggcctgcggggaggggcggaagtcactgtttaatgggcacagggtttctgttttgcaagatgaaatgagttctggagatgggttgtacaacaatgtgaatgtgtgtaacactactgaactgaacacttaaaaacggtcatgatgatgaattttgttatgtgtattttgccacaatttaattcaaaaaatataaatacacacaaaatgtctgcacagaaaccctgtttttgaaggaaatgccctgtattgtcagtgagtcagacgtgggctgtgctcccaaacctgggtggattgtgccctctgtggcccatcactgcagagggtgtcagtgtgaggaggaaaaaaaggggagtggacaggctctgggccacaggcccactgcccactgtgggacagagagtgcttccctgctctcaggagaagagaaagcatgttgctcatgcacataacacattcaccttatagggggccactggacttctagcttcccagacctggttcatctaagggaaagccatttgtaggggcagaaatgttcctaacttcctgttcagggtctcttaattctatggacatgaatgacggcaagggccattatgcattgattctgatgtgcagagttccagtctgagcaggactatgcctgttgtacagactggaaagctgtgacttcaaggggttaagaaaccagccagaggccgcacaaccagcaagccgcagaggtggacggagccaggccgttgggttctgtttgggttgtttcttgctatttaacagactgccctaaatctcagtgacttaacacccattttgtcacctctctgggttgggtagggtgggggctcagctggacacttctcccgctgtttttcttggggtctttcctgtagttttagctcgatggtggaggggccgggggtcatctggaggttagaccaggtggaggggcctctcttattgtctccacatgtcctgtcttgtggcctctccagaagggtggctcagggttcccaggaatgagtgatccagtgagaagcagcagcagctgtggcctctcgcgggcaggcgggaaaccgacaccgttcactggtaggtattctgctggttaggcgtgagtcagcgcctggcccagattccaccctggaggggctgcaccagggcgtgaactctcggggcgtggctccccaaccctctttagaaacattaccttgaacaccatagctcagagcagtaatcaccagtccactgaggcagcagaggggcctacggctgggactgtgggaacagggaagctgcacccagggcttcacccacaggcaccatcgcttactctgcctggctcgcgggtcggtgaagggagtggctgcccttctgctcagctcggtctttgtcccattattttctccatttgttctgctgaagagacagccaggaggcagtgaagtggcccctccaaggtcaaggcagcatgcaaaccccacctgcccgctgagcctgacatttattttatcacaatgggtttcaagcaggaagattgccctgtcctgaggacaggacagccagcttcatgggcacttgacatgaaaacctccagtggcctcagtacccaggtgggggtgggagcactgcaaccctcagggcaaaaccaaggaacatgaaggtgttggggatgcacctgggcctcagcctggcaaagagcccaagaaacacccaggtagactttgggagtgggaaagactccacccacggtctccgagagaaggaggctaatggggcagggggtgaagacaggataaatgaaggaacgcaagaagcctaagggggaaggtggtttgagggctgaagcccaggttgagactagaaggccaggcagaagcattcagatcccaggtcctgtaaattctttcccactggggaaagaatttgtcctacaggaaggctgaggaaaggctctgctgagtctatcttcgctttgttttttgcaagaaaagttttccttttgtgaaaacttatcatacagattgggccattcttgtcacacccaactaaaacacagtcaagaatccagtggggatagcacccagagcacaatacattgctccaaaaatgtaattatctgtaggcctagcagctgaaactgcctgcagtagcctgaaaccagttttatctaagactcctgaaatgacctgctgcaactctcagactagctttgcccatggctgtcacttcccaatcagagcttgccagctactcagaaccttactagtgctggtgaaatttctcaaagagcaatgcataacatttcttctttctataaaacctctgaccttctatttgttcttcagagagagcacttttgattcacgctggaaactctctccatcagtttggtttgcaaactgatgttgacattaaagccctctcttcgactacccagccatcctggtggtcctttgggtaacacttgcttcatgaggctgtacaatggtctaataagagggcagaggaaattcatggtaagccctttatccccagggacagctcctggcaggacaggtgctggaggagggggaaggctttctgtcctttttcattgcttatcccttttgtcttgcctgcatctgatgttgagtttggtttctcagattaatatttctttccagagtagccaaaaaaatcatctgccaccgagttggactggttagagcaccctccccttgcatttttaatgatctgaccaaataataataattcccaaagagtccttagaaatccagagaggtaggtttgcaaaatcaatgttgaaaatgtcagaacaggcttgcaaaattcacattacaaaaattgcatgcagcccccgcaatcaactgaaggcatctggctgttgcagacacaccagcctcacctggcttacctcaggtctccaatttgcccatccatttgcagggcttctcaagctctctgggaccacccagctgaaacagaagcactgtgctgtcccctgggtaaggagggaagccgggctgctagaatgacaaggcatgggaaaaaggcctgactcctgaaatattgttcattctccaaaagctgtctgatcaaggattttcagatgcatgaagtcaaagttacctaccctttttcagggcaacgatatggaaatgtaagtcaagataagcagaggaaaggcaaagaactgtgaggcctgtgagggaggccaaaaaacatgctctggcataagccagcaagggcagcttctcaagaaaagaaattccggcccttgactcttatggacccattctctttctgttggccttagacacagaaactaagacacatgtttagtcaacgatgaatatatgaacattaacatcagacaagatatttgaaattgaaagtgacctagaaaataaaactattgagtgtatgatcatgttagaccctacctgctgaaaaattcctttaacaaggggttgattaagtggcattttagaatttagaaagcacttctcagctacaaagatgattgctagtttcttacctaatcacaaagaggcacagactggtgttttctctgtggcttttacagagaccatagtatattatatacacagctctacacttagtttctctctctgagcaagagtagagggttgccttgttctgttaacgctttggagtgaggttagctttgtgtgtgtgtaggatttattcagctctggccccagtcattggataaagggtttgctatgataaacatctgagcctacatgcatgtatggacacgtacaggaaacgtccttacatggggacgcgtcaggcacgtggtgttggcattctttactttgtgtgatgctgccaatcaccctctgtgaaggtggtgctggttcacactgctcatcctcacttcatggtgtgggcacactccctggtgggtcccaacctgccgggtgaagcaggagcaactcactgcagttttgagtgcgtttttctcatctttccctgtgtataagaggcagttatttgaacaatgagatcacatggacacaggaaggggaatatcacactctggggactgtggtggtgtggggggaggggggagggatagcattgggagatatacctaatgctagatgacgagttagtgggtgcagtgcaccagcatggcacatgtatacatatgtaactaacctgcacaatgtgcacatgtaccctaaaacttaaagtataataataaaaataaataaataaataaataaataaataaataaagaggcagttatttttctgtttctgtctctatcccttgtccatttgctgtggagttgttgattttttaatcatggattaataataataacttgaaataaaaaaactaacccctttgaatttgatatatgatacaaatatatttcacagtatcatgttttaatttttttaagttttgttttattaatatgtagattatttctattttatatgcagttaatgcattaattttttggtttttatttcttgtcccttattcatacttctcttctttaccccaaaattatttatttttctaattctcctacatttccttccagtaaatttatgatttcacctttaggtgaaatagcattatacttaaatgctatgttataccatatatatttaaatgctatattaaaatgtccatcctggacaaagtctggagctcctcaatctcagttttgtcttcatgttttgcacaagctttctctctttgtgtctggcttacattctgcgtgttgttttggatgtgtgtgttcctcctgcttatttggacattgtgagttccatttctagctcattttgttgttactcctgtaactctatcctttgatgagataatgtacccgtgatttagacagaattttcgaagcactgtgctttttctatttccctccatcacctgaccttagttatgttatttttaaaaattcttctggtgtttacatctgttctttaaatattaattgattttatcaatttgaatggattccttttggaccctaggaacaagtatggcatgtccgaggtattcagcttataaccagggctttcaagattacttgaaaggaaaacattcaaaaatgtattttaaaaaattgttaaacagggaagcatgagacattatgatgcaaacagagtgacctaatgttcttagctaagcaagggagaggtcctcagggtcaggttttccaggacgcagtgctaccccagcttccctccccgcaccagagtgactttgggggctgtcagccacaccccactctgagtcggcctaagctgagtgtcaagcattgtggacatggctgcagccagcggtcctgggtatgtccctctgctgaccacttgacacccagtcctggtggctttgaccgcagcttggtcttggagctgtccccatggccctcagagtctctgaagggaggaatccaggaacactacagtaaaccaaagcccagctctttgcgagggctgtgcttccataagtaaggcacaggctgcgaagtcctcaccaggagtagaggtcctcaagagaccctctctgtcctttgtccagcctcctgggcatcagtgccatcatctctggggacagcgtgtatctgtagctgttcactttgtaagcctaatgcccagcatctgtctcctgggcatctgtgtcctgggcattaggcttagaaaaacaaatgacaggtgcctctggcctcttgggcctcacagtgttttgagaacagacacctagataagtgacaaaacgtcaaagctccaaagagcagcagcaggtgcaggcaggggaccctgacatagagatagtgactctgctttcagggggacactgaagagtgtgatctgaggggaggtggagggctgagcaagcagagattaggcagtgttgggatggggccattcctccagcctcctgcccaccatctcacaactccagtttttcccacttcccggtacctcctgttaaaaccctttgagacgggacacatgatgaaagcatttgcacggccttggtcagctcggacatctgccaaggcttggattctcctttcatcaaagccaatggattctgcacgcagctcccaagagctggaaacaaagtgggagaaccctgtctggagcagtgtattcattcatgcgtgcattcattcaacgtgcatttatcaaagggccactttgatgtgctggagatatagggatgaacaaaccggaccaagtcctcccccgcacagggcttgccttctagtggggtggcagccaacatgaaattaaacacaagtatactatcgagtaggtaaatgctatgaacaaaaatgcaaaaagccagatgctcaagggcagaggctgatgttttgggtacggtggtttgggaaggcctcaggagctcacctttgagcactaggtgtggccaacatgtcgagggtaatggggtaggtttgactaatcaaccacaaaagaaggcctctgacagaacttagaggaagtagcaaacgttgcagaaggaactaagtttgtcaaatcacagcctgtgtagtatctggtcacagagagagtgggtgggccaggcctgcatggatccttgaggagaggtcttaggccggccgacagcagtccaggaaacataccagagcagtgcccctggataggctctggtccagcatgggctatggtccaacccggccagggaagcccccagccccaggctgaaggatgtacagcaggcggctttcctggaaatgctggctcgatccaggtcaggtgcacggagtgaggcctagtggtgccgtgaatgcccactcctgccaccagcccaactcagtgcagagggggacctagatacatttgctagacaacagggtgccagggcattctcttctcttctcataacataatatttcctgtactatagcttacacttcagtaggtggcgaagtccacgtgagctaagcattctgtgcagtggtgatttttgatgatttctggtagcaaattgagccaataaaatgtgaccaccatgaaggtaagaaggtaatcagggtctttagagtcttgaatgcatgggttatgagccccacatttcggtcgcctgttaaatatcaggcctttctgggtgatgggctgtctaatattctttcttgcctgtatttttctacattgtttgaattttatatctacacatgtatcgtttaaaagggaagctcttttccaaaatgctaacactcctgttttcataagtatgattttcataatcccaaagcaggaaaagcagtcatctctgtgctgagcactagggaaacctcagatgactcagccccatggaaagcaagccacttcctgccgtgttaaaggagactgcgctgaccttcaaatccagcgagtggtgacacgggtctgtcagctagtgttagggattgtgtagttattttttatgaaggacacaggaagccagagaaaagagacattcagaagggagagaattctagaaattcatcacattttgtgggaatccttaaaataataagtttgcaataaaactattttgaatcactgaaagtttcacttgtctttgggattctattatctggtaaaacaacaacaaaacaatctcctaacatcttttatttcatgagttgtagaaccaagtttagattttgtacaaagttgtaaatttgtatagaaagcacatgatttatggggataggataattccatccaaaccaaaggacaggtaggcaacaaaaatctagaagctcttggtttcttagcagctagtgatgctggagaaatttctatttccaaggaaagaaggaagaaaaagagggggagagtgaggtgaggagggaagaaagaaagaaggcaggaatacaaatgtctagatagatataatatgtgtgtgtatgcatgtgtttatttgtgtgtgtaggtatttatgtgtgcaggtatttgtgtatgtgtatttgtgtgtgtatgcatatattgtgcacctgtgtgtgtgtgtgtgtgtgtgtgtgtgtgtgtgtctgtatgcatgcatgtatatttgtgatgctgttctaagtctggagagtctgctgctgctccagtctgaaccacacacacttgccctccttcccaggtgagaagctggccctagctgcagggctggctgaagaatggagagagatttgatttgtcaggttcatgtcagatgttgacaaagtcatctctccttcttgttcacatgaggtccattgtatttccagcctcctcaccctgtggaagtcctgcctgtcccagagcaggttttgcaggaacttaccacacaactcagcccttcatcaaatttcagcacctggacaggttgctctccctctcaaggctaattcaacagaactgttgtccctaccatcagtcagatttcaggtcctccaaggtccagtgagcttgctctgagaacagactgtctctgcagggctgcaggcaagaagtgaggtgagctatgtcttttccagtgagagtcacctgcctgggttccccgagtcggccaacaccagctctagacgacgtagcgtgggtcacttatctgcctccacctacccggagatgtgctgggaagcacagtgacccagccaccatgtcagttctctttcctcaaaacagtgctgaccacagctggctccacagaacagatatccattgagatgctctgagggatgtgtggagggtttcggaaaatacactctctcggggcttggaggtctggcacccactctagcatggctgtggctccaaggagagcctggccttgcctgggaacctctgccatgtcaccctcttccctggcactccatgaaagatgcagctctcacagctcccagatgttctctcagcaggagctatacaggttagcaggaggcaggaggcccagactcctggacaagtgtaggcagctctctcggtgggctgctggggaaaccctgctggctggtggaaaagagttaaacctttaggacagaattacatcccttagataacccaattctccccagcttgcagggctgctcaagtcaacaagctctccatactcagtgagccaaggatgccagatggcaggctgcgggcactgatgggccagaggaccaagtcagtgttacgtggagaatgaaaacagggagaatgaatgacagagcatgaccgggcgggctgaggtaaggcccaggaaggcccatttccacaaagagccacacggcaagaagaagccagcctggtggggaaagcagcctgtgcaaaagcttggtttgtccaaataaagagaaggagaatgacacggctgcagtcttgtgagccatggcagagggaattagagcagccacagcgggcagtaagaggccaggaaagggaggtcaggacttctatcagtgttgtggagcaaggctgctgggtctgaatcaggaacatgaaatcatctgactggtggttttcaaagaaagagcttgctgcctgcctgcggggaaggactgcaggaggaggatgctggatgcaagtagggaggctttgcagcaggacaatccagggtgacggcgtgaggtatgagggtcagagttgagatggagtcagtctgcagacttggcatggaaggcgagaactcacagagagagcacgtgtgctgtatgtgtcacgcaggatggcaaccgctcccagacgggcactgatggaaacagtgaatcagagaaagggctgaaacagtgccctgaagcctggccaggcagggtcactgggagcaccctggtggggtgtgcaattgtatggttcatttgcccaacacggcacaatgcacaacagagaaaatcaaatcaaactccagacaagaacactttgcttaagaaagcagatgtgagaaatgtgccacttgtttgtgaaagtttttcatcaaaacagctctcacagagatgggggggtttgatttaaatgagaaatgtgcttataaaaaacagatctttggtgagtaatgaatagctattatcttatctatttaattatgtatttaaacgacatatgaaatttattatattttcctaaacaagtttgaattatgtttttgattatctgaagtgcaacaaagttcatctgcaatgattcagctgtttattcattctaatatatggccacctactacactgtctggcacctatcgagagtttaacagatgtttaattaataagtaagcatcagttggtgaatagcagtgctattccaagatcttgaggaaatattagaatctataagatgtggctcttcctggacaatcaggctgaactcagcaattctgccacttctcagaggccaaaaccactccatgagaaggctccctatcagagccaaatcacctctgggcagagccaagataaatccagtgcaatctacatgaagttgtctgtttagaccacacagatctgcacaatcttccctacagggccctggtgacatctgctgaaatgaatgaagcagtcgaatcaagggcaccatgcttcacagtcacgtttctcatcttttcgctgcatggactgttctgcggggacgtggcgggtctcggggctgggcagtctcagagggtcaggatctgagcgcactatggatccggggagagggaagggttaagaatcagtgaggaaggggctgggcaaggacattctacccaccccccaccccccgccaaaaaaaaaaaaaaaaaaacaactcacaggaggcaaatctttggtgtgtatttgcaaatgccaaagagaaacataaaagaatggttttcctatggaacactgaagaaaaatgtcgatcctgatctttcctctgtctcctgcttgccccctgccctacgaggccaagcagccaagcaagtggtcaacaggtggcctctccgagcagaaccgtttcagatgtttaagagaaatgacattttaggagtggagcaatgagctcaactttctgtgacaaacttcaggggtacttgtttaaaagcatgttatttgtgcttcacccacaaaggttccaatttggaagagctgaactgggcccaggaatgtatatcctttgtgtgtccaggaggaggtgtgggtggagataagcagctccttgaccacacttcaagcaacaactggggtgtgattctgaggcatgtcttctcctcctccattgactttctcctctccaaagggttatcactggtgtgaccagctcctccagaggtacctaaggtgatctcatagcaaagacccacgccctggacccatcctgctagtgatgaatctgaaggttctgaaggttctgtgcataaccatgtggagcctgagtgcacaggggcccagagctatcctgatttctaatctggagctcttttgtctctaccaaactgcttctttattgaaactttacatcctgaggggttcactgaataacagcgaccccaaggcacctagaaacaagcaatgtcatgtttctgtacttggattagaaaacaggaagggaaggcaggagagtgtgtggtgtatcttagaaaaactttttaaacgtgatacaatctgaggaaaatttgcattgatgccagtagagggctagatagctttaaaattgatcatttaaatgtattgacgtagaaacgtattcacaatatactttaaatggaaagctgtgttagggtcaagtcttacaatgcgattccacggttgcactgccacacacacacacttacatatgtgcccagaaaagcattggaagtaaaccacgtcctcctgttaatagcaattgtttctgggtggtggagtttaggggaactgatgcacttttttctttggttttgcccatctgtactgtaactttccccgaacaaatgtgcatcacttgtgtcataatttactttttttaaatacatggaaacaaccacagtctgtatttattctctggttaaagtgctaagccttgtaatctagaatattcatctgtccgagactgtaccctgggactcatctcacgatgagacatttggcctcctccccaactcagtttcagaattcatctgctggatttctgagtcccactgagtgattaatgtcacacgggtgacaaggcatgactcataggcaccaagaaagcagcagcagtgtgtgcaggccgggaagttgccacagccctcactcagggcttcatgcacgccagggcagtcctgggtcaatggtctctttcccctcctcctgttggatagatgaagaggcctgagcaggaaggtggtggttccgtggggaatcttcagtgactggagtatgttgtaaggatggtgaatcgtcacttggccagccagggtttggcagtcaagacagagagcagtgtctgggcccacagcatgagagactgctggacttcagtcttcggagcaggcaagaacggggagcttctgtggatttctattcctgtcgcctgtcactgtgaacagtgcccagtactgctggtcagtaaatgtttgctaaaatactgagcaaccaaggaagtgacttcagttgaactctgtacctgttgtgttcacttcctttgcaacatgcgtgactaatggttactccttctcttgaatgcttccagaagagtagcactcaccacctcatgaggaaaggcactgcaactttggtcaatgatatctgttagaaagatcttttcctatatttagaagagtgattctcatacctgagcatgtatgagaatcagtgggtttgaggtgggcccaagaatttccctttctaacaagttcccagaagatgctgatgtggcagcttctagcacagtgcttggaaatccatgagttttcaagaggacaatctaaagtgttcctttgttttcctttacttcccctcattctcaaatcctatggggatgacacagagaaccacaaacaaaacaacacacacacacacacacacacacacacatacacacacagagcacccttgtccctagctttatcctctgggatacacaggacaagctcctccctgttctatgtgcaacttttaaaatatgtgcaacttttaaaatacgtggatgtggctttcacatcttcttagtccctctttagcagattttttacaaaacaaataagccaggaaaccatggtctgaaaggattcctgctctggtgagatccaagacccacagcgagggcgaagacagaggtcttgctgcagccccggcttcctccacatggaggtcccaggaagacggcataagccattgcctcgataataacctgcttgctaacttccagccagtgcttccacattttcatgacttccaaaggttcagatgaggatggtagttgtgagtttgggatgaagtcttctgagcgactcctatggcccagccacagggacctggggctggagagagaggaccatcccaggctgcagcagccaacacctgtgtggaggtgcaggcccgtggcccccagctgtggtggacacagctgtgcttcctgatagcacccttccctgcacctacaccgtgacatcctcctcctcagcctgagtgcaggcaccacctgaagggtatttgggggagggcaccagtgtccccaaggtaggagctagtgcatatggcctcgtccttcagagggacaattctgagaggcaatctgcgtgctttcaaaggcccagaaacacaccctgtgttgcctcctccctgtctgactcttcctcttcctcctgctccctgggaccagctcccaaacaaactcaatttcttctctcagtcgaagtttgctaagtgagtgaagagtcaaataaatgatgttgcttaactctccctctgatgtgtgaatgtcctctaggaacaagccttttgtaggagaactgtaggccagggctgagtgcacctgggatgcaggatctccaggggggacctatcacttgtgcgaatttaaacctgctcagagcttagggcccggctctgctcaagatgggcagaaataaagaagactaaacatttacatctcaagagtttatttaccctggcctgactcttcaaaaaatgccattgctgctaccctgaggattaaccatggccatttttagaccaggtgccatcctgcctttagcctcgggtcacccctctgactcactgccaggaaacggagcctagaccctgatgtgtggtgagaattggcctggttttcacctgagatccacacttgagaaagctgattgaactcacagcgtgccatcctgcctaagatcctcttcagagattctatttcccagagggaggggatcactttccgcagtggggtttctatctgggacatttctcttcatctgtaggaaccctatttaaaggctagaaaatctgagggagaagtggaaagaagaaagctgtgtagctgtgacgatggcctgggacatggattcccaaagcctgaccctccgctgtgccccctgctccccagcaggcatggttagcctgtcatggaaccctgcacctgagcctgggcgagctccagattcctcagcacacagagctccaagctcctcctgccaggccgccagggctggctcccgagagaatgcacaagccttttgtggtgtctgagaaaacacagctgaatctactaggcaaggggttgtatagggcacctcgggaagaagtcgcacaggtgcccccagagatctcaggggcagggaggggctcacccataagggaaggggaggactcagaaggctttgaggaagaggcagctcctaaaatgggtgagggcagagtgtgccctgaggccccacagcaggcaagcaggtgactggagaagcagctaggtctggtgcctgtgtgccaggcttgtatgccagggctgggctgcatgggatgcacaatgctactgggccagcaccatcagcagtgtactgcccctcacacccagggcaggccttgaagctaagagagggatggggcagtgcccatcgttctcctgccactggagtgtgaccttctggtgccatgacagccagtgggtggcaggtgcctgcccctcttcccataggctgccccaggaggaagaggggcccgttcctgtgagtagagcacagtgaaaccactctcttttctgcacagtgaaagagacatccttcacggggtgcagagaagctgctgccctttcctccccgtcaggccagagtcttccctactccctgctggggccagggaggacagaggcagccctgaagcttcctgtggctcaactcttgaaggctgctcagttagagaaaaaggatggtgctgaccatggaggaatctcacacacactccaggcaccctgcctctgccttgctctctgcagtggccactgagaactcttaggaattgacccttgcttcttaggcactgggcatgagagagggccctcccttgctgtgggggcctcccaagaccagggaggctgggcctctggaggtctcccctgaaactccttacccagcgggatcatgccctgggcctttgtgcctgccggaatcctggtgggtggaggaaatccgttaccctcatgagagctacctgcctagacccctgctgacctgacctcaccttttgtttgacccaggaacttacccgccccttgctgggggttggaactgtcacatgtcctaagccagcatgaacaggcaggatagttaggctgactgtgattgtgctggccatgatgctcgacttggccctaggcttgactttgtttcatctgtaatagtctccattttttcttgctgtgaagtaagccacctcaaaacttagtggcttaaaacagcagtttattcttcttccctaccatgggttgagtgtgtggtccttctgctgtgcttgatgtgactgtgtggcgtcgtcacaggggggcttaaatggggtgagacaccaagcatggctcattcagaggcccagtgctttggggaacggccaggaggctgcactcagccaggaccctcagcgtcatctcagggtctctgcctctcttcgtggcctctccatgtggactttttaattacatggcagctcagcactcccagagcacaaataggagctctatctgtaggaggtggccaggccttctacagccacaggcccaggtcccttccaccacagcatgtgggtcacagacctgccctgactcacacagtggaaggcaacagggcagcatgcacaccgaaagccatcactggatcctgtgtttacagcatctcaattccacagcaacacccgagtttccatcaaggaggcaatgaagacccagcccgggcagcaggaggcagcggtgttatcaggggcccactcgttctgagggaccataaaaatactaggaaaagatcatttttcatcttgactacttaacaatcttacagttttattatagtcttaaagctcctggccagggttttatctttgggaagtatctctttatgtgccaagtgccaccaaacagcatctgttggtgcctcctcctacaggaagcaagtgcctcctcatacaggaagcactggcattaggaacaccctgtatttctcgcctgcagctgcactgtgtcactcactgatgtcattctcctatctgaagggctcagggtccactctccagcctgacctgctgcgaggtcacttagctaagaccagctaaaaatagcaactgttgctcagaagcaccggctctgcatcatgggctcaccctgacgcctatgcctccccggggacagggccgcacgatggaggaagagccgactgagccagctccagccaccttctccaagcacaggaccttgtgagctgtgagctgactaacagcttcagcatcgagctttgggggatattaatgcttagctgataagcattaatcatatcccacttaagtaatggttgggccaatttctgttttcaattaagaataaaatgtaagcatttggttcatatataagcaatcttcagtgaatggtaaattattattttgggaaaaaaagtaaaatggacatgtacttagaactaaactcagagccttgggcagtgtctaggatttctctttggaagttggattgggaagaggatgtgcctgggagcttattggatctgaggggtgggaggagacttccccagatccaccgcactgccacagtctctctcaaggcatctccaaaggtggcatcccaacctcaaagtgacagaagaagaatcatgggccatcggcggcactggttttctaggttgtgttataattttcatttccccatagatgaaaaatgtcaattgtgttcatcttgaaggctatgttagaattagaatgctattaaaattttcatggataatcttaaaaaaatgcaatgatgaacataactacctcctagaaattgtgtttctttcttcctttaaagtgaaaaaaaatattacctgttgctaccctgttcaccattagccttcaacgtgaatggtgcaaagcattttcagtgttaaggcggttaaaatggtcttttaggaacagcttagacattagcagaatgccttccttattctatcaccgtattaggagaaacaagcagagcccccaccccaagcctgtattctgtccactcccagtaggtatcagacagaaatctgcgaagcccctcagtgctttaggtgaatcggtgctgacatcagctctgaactttccttcttccacccaggtctgacagaggacaggtgagcaaatctcctcaaagcaagtcagacagagcctggcaccgcaagatcaggggagaggtcttcagaaacagcaggctgacattctccccttcccagaggagaaaaaggccctctaactgagaaacagtttcaccatcagtggacagctctcccatgctcagcccatgccctgagaggccagaaccccagtgcaggccacgcacccacatccactcctcatgttagaggttgtgtgcgactgctagggctgctgggtagactgtgtggcttcaactacaggccttgatttcctcacaattctggaggccagaagtctgagatccaggtgccagcagggtgggtttcttctgaggcctccctcctcagcttgccaacgtccatcttctctctgtgtcctcacagggcccttcctgtgtgtctggatcctaatctcctcttattgttaaagataccactgagattggattaagacccagcccaatgacctcattttaccttagtcaccactctaaaggccctatctacaatacagtcccattctgaggtaccaggagtcaaggcttcaacacaggaattttaggggagacagaatttagtctctaacagaggtcatctcatttaaacccttggacttgaaagtgtactcctcatctgaactgctgcaggtaaggatgggaattaagagacccaaggaggagtgactgttgtatcaggacaagcttgctgaattgaaatgaaaaacagaaatctgtccattgtgccagtcccattccctctggactcagctctaacaaggtttggaaggccaaactcccagatgctgaaagacaatgaagtttaaaaacaagtccattggtggcatccagatcagagtttccaatcagatacctggtcctctacgattttcacacccagcagggaggagagcaggcagccctttctttccacactccctgcccacttcacaacaatagttgggaatgtgtttctgtgaaagaagttcacagccagccacagtggctcatgtttgtaaccttgcactttagaaggcgaggcagaagggttgcttgagcccaggagttccaggttacagtgagctatgattgcgccactgcactccagcctgtttctgaaagagagaaagagagaaaagaaagaaagaaagaaagaaagaaagaaagaaagaaagaaagaaagaaagaaagaaagaaaggagagaaaaggaagaaagaaagaaagaaagaaagaaagaaagaaagaaagaaagaaagaaagaaagaaaaagaaagaaagcaaaagaaagagagacagagagagagaaagaaagaaagaagggagggagggagggagaaagggagggagggaaggaggatggaaggaaggaaggaaggaaagaaaaagaaagaaagaaaaaaagagaaaaagaaggtgttagataaagctaggttcttcttcagtttgtccagttcccctgttctttattctctaaattcggagtaacccgccacctccccctgccccggcttttgctgtgcagtaacctgtctaaacatgcctagacatgagaagccccagtccacattccttcccttatgtgggaataggttagctttctagtcccccctcagatgaccctttcctcctcttcctggctcttctatcacgtgcctaccttatctaagaaagtttgaatgtttagccaatcaggactagtttagattgtgtggtccaaccccagtcaatgggggaaagacacagaggtagaatctgcgttaggaataaaaaccgctactctccgttgttctgtgtgcttttgcagtcatgattgatgcaggcagcacccttctgcagaagtaaattttgccctgcagcacaaaagaggaaggaaagcaagggaagggaaggggaggggaggaagggaaggaaaagagagagaaagagaaagagagaaagagaggaaggaaggaaggaaggagagagagaaagaaagaaggaaagaggaaggaaggaagaaagaaaagaaagaaagaaaaaagaaagaaaggaaggagagaaagaaatgaaagagaaagaaagaaagaaagaaagaaaggagagaaaaaggaaaaacaaagaaagagaaaagaaggagagaaggaaaggaaaaagaaagaaagaaggaaagaaagaaaaaagaaggaaagaaagaagaaagaaagaaagaaagaaagaaagaaagaaagaaagaaagaaagaaagaaagaaagaaagaaagaaaaagaaagagaaaggaaggaaggaaggaaggtcttaacaccttggtaatttttgtgctcttccctggactttggactttgcagccttagggagacagagctctttaatgtacactttcccatcaggcactgcatggccaagaacctgcctgcaaagcccccactgaagggagggtttctccaaggagctctcccctttaaaggcccaggattgctcctgagagtgtctactctgccatcaataccataaagatttcatcagacggcatggagagtgttcagttgggcactctgggttgaggggtgagggtcacagtagggtcatctggatcatttccctgtcccccggccccagcttgctccctgattgcatgtcatttgactcaggctgagccttgcagaagtcatagcggggtggagatgactcacactatgtggttttccaactgttgggagcagccaggcagggtccttttgtcatgagcaaggccatcgccaaatacacattggccagggttcgatgaaaatgtgaaagtctcagccccatcactggactatgacagaagcctgaccaagtatccttatcgaaatgaaaacctttcatagaggtggttctccacctgtcaggagtcactgatcctaacaggggcatgagagctgaaaggaaactttcacagtcatttaatatgacatctttgtttttccctttcttagcatttgtcccgggtcacctggctgggggtcagggggtacataggccaggatcccagctatgactttaggaatgcctgaagctggggggtgctcgggcagcagggaggtgctgagggtgacatgagggtgtacagcatggcagggcagcagaatcatcccagaaagagaggatagccaaagacatcgaggcacaggcgaggttgaggagcttcgacagtggccctgaaaggtgtatggagaccacgtttcaggactttggccacagtggaatcccccgactgtttttggggactgtggtcagggtgacccggctgtggcacatagtgcccaaaaacagtttctccacatccctgcagggcctatcagccaaaattttagcaggcctcaagcccagaaatcactggaattcaaggctcttaaaaataatacttggctaggatacatgaccacatgacattatttctagttaaatcaaaagctattgaggaccatgtctattttcatttcatttatacaggggaggacacctcccagcatctgggacagagggaagtacacgtctttacaaccttggataaaagtcatgtaactcatggcgcttcaccttttcccatggctgccagggggctcagataggaactacatgcttgagtcagcaaccttcattaaagtagagtttatcttatgactttgtctttcttctccttcagggcatgttatgtacttttaatctttatctttatgtatcctactttttctacttattttattataatttgtcttgagtctttttagaaaacaggagaatataaattgcactggaagaatgttttaatcctctctttaaaaactgtttcatatacattatttaatcttccccaaagccctgtgaactcccctagtgcctttttttttttttttttttttttttatgatcgagtctggctctgtcccccaggctggagtccagcggcacgatcttggctcactgcaagctctgcctcccaggttcacgccattctcctgcctcagcctcccaagtagctgggactacaggcgcccaccaccacgcccggccaattttttttgtagttttagtagagacggggtttcaccgtgttagccagatggtctcgatctcctgacctcatgatctgcccgcctccgcctcccaaagtgctgggattacacgcgtgagccaccgcgcccggcctcctagtgtcttctgagtcttccaagggttgggcaattttccctccggtcatggagctgagccgatttcactgtgctctgattctctaaatactgctactcacgtagggcaattctgttcaacacggtgagctgggccggctgtgactcacagcaccgagcccctccaggggtggggagctgatctttctctccaatatgcatccagatgaggcagcaggtctctgaagggcaactcagttcatctcaaacatgatgcccagagaaatgttatttttgctcccagttccactctgtgattagcagctcacatcttcccattctcaggcagccctgggtgcaggctgtaggtgccaggaggacaagggacccctcttctttttatctccataaacccatggctgaaacaagtgcttggtactcagtagataatccataaatatttactaagtgagtgttaatttgggcaagtcatttcacttctctgagactcagtctcaaaaatgtggggagattaactcccagcttcctcctagtatcgtcaagcagattaaatgagattcagagaaagcaaagtggtttgcattgtgtgtctttcattattcatagtcaaaaaatcacagctgatgcccagaaaagcaccttctaccctgctgacttgcacctccactgatccgggagcatcttctcttttaagaatatgctaaaatatttgctctgggggaaaggcacttgtgctgatccaaagagattcaggaaggaggagtcctttatggcctcatcttgcccttagaaacttcttccagcccatttctccatgctgaggaggaaagctcaggtcaagagagcagtagagaaaagatcaagtgctcctatgggccttttgaatacctctaacccagccgtgcagggattcaccttgcttccatgcatcacgacgagggagggtccatctccatcccctcctcaatggaggacatcaagccactggaccagagcccttctctgatcgctacccccagctgtgtttcatgggataagaaatcaggtattgtaatcctctaaaagacacagaagcaattttagaaaacatacattgagctggtgctgacattttgggataagtacataaacatggcatccaagaatttaagacaagcacattgcatgggtgtccaacatttgccattggccatatttgtgttttaaagaagaattgtaacctaaaaataggaatcacactttattcattatatttttcacagagctttatttttgtattgaaggctggaagctattaagctgctgtctccttacaactgaccaaagcctgtgtgtgcacgtgatttttattctggtactttgccctgggacatcatttctgccccttgccaccggtgcaagctggacttgaagacaagggtcccagcacctggtggaaccgcccaacaagcaccagagtcagtcactggttccttgtaccccattttcaagcacccaaagtggttcttcccctcatgtatcgttagatctacagctaagccaaatagtgaaggtgaagacaaaggaaagggctcaagataacatttcccttccctgagttgaagtcattagtgacccagaaaacaggaagggggtgaggcctcatttagggagaggaaaagcagaggaagtggcacccgggggtgtggagcaggatggagcacacttgaagtgctccttagaaggaggctggtggagccagcctgggggtggggtgggtggggaagcttggctggggacacagaagggcagaaccactcccaggattgttttccaaggacaatttacagtacccattgttggcttttcctctgggtaattagacacaacatgggagcaagggatcctcattcatcttgtcactgggttttaattttcttggtccttcagctcccagctgccctggcagatgttctgtccacaagttccaggaagttcagcaatgcttcttctgcactactttcacccagagctgacatggtctctggtaagcagctttaatttgatatggctggatgtactttggggctggctgcagcagatgagaaaagcaactctttttatgatttctatagcagggttcattgtgaaatttaaagcagagaggagacttatttctttaccctgggtgtgacaccctttgaagctagctgaagtaaaatgctttgccaaggaggagggaatgaaggagtcagcatacagaatgaaactggaccttaatccatcagtgagatagacacggctgcttaacagatgaacgaatacatttccatggtgcaatgaatcatttcagttgtccccttaagagtacatttctgagatgtatttctatagtgtgtgtgcgtgcacctgtgtgtgtgtaaccgaaatataaattgggcttcatgtggtccaggctatacacagagtcactgtcaaagcagcaccaggctaaaacaaaaggcatctatggttagtttcagttttcactcaggtgtctggaagaatgctaaaagggattcaatttaaaaaccagagcaacacttcttaaaattatgttttatttattttcttattcttccaaaactcggtagcctttcacttgaaatggcaaacattcacatcacttccagcttttgagtctttcctattttcatcttctgtctgtgctctatcagcattttacatggactgtaaagttttctccctatttacccattacctgaattcttcaaaacaaaagagggctcagaagctgatccaagaagcaggaatctccttcccttcctgtctccgcccaccctgcctgtcttcgtcctctcaacagtttctgcaccccagacttggctggctaacacccagctctccttaggagcaagcaagggagaggctgagactcattcagaggtttccagtcctctgaatgggtccttaggcaatggtcaggaaatgaagagcaggggtttagagcagggagaaactggaatttttttttaagcctatagcacctgatagtctcagtctcccatcaaggtactaaccaggccagaccctgctgagcttctgagatctgctgagatggggcatgttcagggtggtatggctcttggcagaaatattattttctgtgttgctaaatcatgttgctgccctagcttccagacccagctctgcagacttctgaaaagaaaagcccatatggacgggtgccacccaagggcatctccgctgacagcccaactcccccccagcccccaacacatacacagggcaatgtctccttgtcgggtgtgagtgtcaccctctggagttctctgagactctcccacactgagcagcctggagtccagccctgggtttcctcacaggcctcagggtcggtggtggaacacaccagggtccttgcttgtggaaactctcagaggaggctgtgccaccaagtaagcgtccgtggggtttcggatcgcctctgggccactcctgcctctaggaacctcggctggcacctcgaggtgtgggcagagggagaggctgaggcaagacaaggcagcaaggtgagcccaggaggccgcaggagccagccccagctcccccaggaggcctggcttaggcatgctgaggctccatccccctagcctgcttttcacaagtcaggactgacattctgtgcagacccagggatcctgacagagctgagtaaagtatgagtgtgcaatctgaaagttcttgagccacactagcatgcgagcacaggaaactgctgtgcgagtgcagggccctggagcagatcctccactgtggaggggcgcagcggctgtggccccgggctgaaacgatggctccccagccttcctagctgttgggggtggggtgcagcggctgtggccccgggctgagacgatggctccccagccttcctggctgcttccccatttcctcccacacaggctcaccgctgtagtcctggacacactgttgggctggtgcatagcaggaacccaatacatgagttgagtgactggataaacccggaggcactgacaccctccaacggggaaccccttcctcagttcacctcgcatttgcagaaagcagagtaacatatatgacattactagaaaatagcaggggaaatgtaaaaattgggttcaaagtagcctcctggagttgaaatggctgcagctgtgtggaatggaacagcaaaggcagctccacagcagaaaagggtctcaacttaggccctgggagatggacacaatttcccaccagggagaagagaggccagacgcctctagccacagggatagttggcacacagaggtgttaactttgggatgagtgtggttgaagccagggaaggccaagccctggcatctcacattcaaaggagcaggttctccttggagcagcccccaatcccccagaggaggagggacccccaggtattctccctcatagcaccttttttctcattgtgctcattacatttgtgatataatttagagtaagtcatgcaatgacgtattaaatatctgtctccccaccagacagcacactgcatgagggctgggccttaacacttgggttcactgagtacctggcactgtgcccagtgtgttgtaaggtactcagtgactgcgtcaacacggaaatgagaacgccggggcagctgctcccccacccctacgctcgctgcagacatgtgctccgtagagagggctcctctcgaggcctaagagcgctcctggcttccaggatgcatggatagatgtgtcatccagatggaccctggttggcactggacagaggggcctggggctgcgccaggactgatggtagaagcacagcagagggttggtctgggcacccagttcagagggtcctgcttgggggcacgccctctcctggaggaagccaatgctataaaattccgttagggacaccccagcttctgcttccctgggttggaggggctcccaccaggcccctccttccctttggctccctataccccaaaaagggaagattctagcagcaaggtcccattctgactccaagatgtaagtcccgtgccttctgctggccaggtcccgcacatcctggaactgggccgcagggatctgaagcactctgcagggtctctccccaagacctgactggccaacctcctctctcctcatctctcccaatgaggaaggagctgtctgaggagagcaggaggcaggcccagccagccttgggcaggtgtcctcctacaccggggacagagagggacggtgcacacagatagcaagcagcctgcacaggccagcactcagtggctgcacttgccaagtggagcttgcttcatctgcagcccaggcctgtgagctacaaacagcatctggatgaacatgttgggctttcacctttggaactgtggtgagggcagtatcctccttggaaaagggttacagcccctgctgaccccgtggttgacagctgtgaaggaggcaacagtgacacttcctacaatcccaggccagcagccccagggagggaacataaagagacccctgggagctaaagctacgactgctaaacagagccctgtgggcatcaggacgggttcaaaatgagatatctggaaactggaggacctgcaggggtggtcagggtgggagcatctcgggagcatcttcccaccagagcaggtacaaaaatctatttattcattcaacacatagtggccacatggtcagatattgccatctacctttgggaagacagatgtgaggatgagatgggacggtcacagagggccagcagagcagagtacaaaaccaaagaggaaaccccttctgcagcctgggggagagcatctggccctggacaaggatggaggcagaatggtgggccagagaggcacatgaaaggtgatgtgcgtgggaccgctggatgaatggatgtcctgaaaattgcaccttgatggcaattttagttcttctctgcaaagccatgtgcctcagccttgtccacatgccagaatcacccggcaagctttgcaaaatgttgatgtgcaaaccccaagcacaaagattctggtgtctcgggcccggggtgcagcctgggcatcttcatttaatgcaagtgattcattaatgtgtgacagtgctggagatccctggcttggagaatcctaaaattttctctagctttagttcagttgcacctgtaggtagagcagttgcagctgatgacaggcaggctgtgggagcaggagctcagttaggtttctgggcctctgagggccgcagggtccacctacccacccgtagattctgcagtatttataacttttttggttctgcctccagctttctggggctgtctggtggcagaacagtaagaagggagggaaaggaaacgtaaaccggttgattccaaagtccgtcctggagacacagtgcagccataggcaggctgggctcgcaggctgtgctgagctgcagctggctgggactgcacagtgagctgccggacatgcaacaaagcggctgggggcctcgaatgggcacttcgccttccagaagtgtgtcccttgccagggttattcacgctcccgcagggctgagagctggccagcctcctcctctcccagatggagctcagggctgtgtggcggccgtgggggacctgggacactggctgctccaagggttttctgccggttatatccatttgggatgtgtccagggaaaaggcctctatcagctgcgagaaaaagaacacacattcccgaaatatccgataaacaaagatgattcctttatccaccccactggccaaaatgagcacctgtggccttgtctttcactcaggaagtgcggccaccctagccgctctccctcctcccacactccctgccatgtggccctgtcccctcctcgtcccactccattttccacttctgtgtccaggcctttccttctctctgcacctttcctcagtgtaattttcagcctcaaaaagcatttttttaaagaggcattcctctcattgcccaggctggagtgcaatggcacaatctcagctcactgcaggctctgcctcccagttcaagcgattctcctgcctcagtgagcctctggagtagctgagattataggcacacgccaccacgcccagctaatttttgtatttttagtagagatggggttttaccatgttggtcaggctggtctcaaactcctgacctcaggtgatccacccatcttggcttcccaaagtgctgggattacaggcttgagccactgcgcccagccaaaaagctttttaaaattacttttaactgcctttatagccctctgagtctttgaggggaaagaactgtgaggtttctcatcagatcaaattgtggggtggcctttcccagagaggagaaatcatctcctgggggaggctgggctgatcccacgttgggagcggggctgcgggtcccactcttgggcagaggccagcagagcatgcgctctagtggggaattcgaataatgcgcgagcctcagcaaggaaggagcttagctccagtgcaggagcacatagggaaggtctcagcatctcggggtaggcgggtggttgaggcagggcaaaaaagagagtcacctctgtgctgggaactgtccttaccatgtgaccagctgcaaagacttcaagcacggccctgtgggtgaggagggcagggagtccaaagatccttagagactggagaagctgagtgtgcaaacaaaagagagaaggtgggtgtggccaagaggggcaatgccaggagtgccatgggagatgcctgcagagagctgcccaggggccacatcacagcacccctcgcaggtgctgctgacgcaccagtgtggtgacaagccacgtccaagcaagcgatgaaaggactgagttgttttgcaaaaagttcttgccatctcctccacggagagtggataggaaaggggacacaaacccatccatttacttattcttcctttaacaaaatccatccatttactgatttcttcccttaacaaaatgttattgacagtcaacccagtttagtgatcaacaggaatttgtgaagatcgggaccatatcccagtgaatacggtgctcaccatcagtgggtggaggggactcccatgtgagcccgcaaacaataccccatgcacgcatgtccttctatagggttgagctgaaagctctggaagcacagcaaagtcaccaggagcttcattctgggaaatcagagtaggcctcataaggatctgccctggagccaggtccactcagctgagagcctgcatttttgttgacagactgagtgtgcatcagtgcaggcgccggctgcagcccaaggggctcggggggccccagagcacacagggtgtggatatgatgtaggcatcaaagacaggtgaggttggtaaggaatcttgggacagataaagaaagtcttagcatcaaacaaagggtcccctctttttcctagaagtagcaagaaaacccttgaggtgtttgatccagggcatagcacagtgagacatgctttagaaaattaatgcagggcttgctttggtttaggttcactcaaatccaagtcattgactcccacctatttagaaggttcagggatctccaggagggaagtggggataatggtgccatggaatggagctctgtcaagccagcattactaggtgggcaacggagcttaatgcttgcatagaggctctaggagactgggcaaaccccgggcctcagaggcatcctgggcagggcaagggagctggtgtgctctgagcagctggctcgggccttggccaggagctcctcccgggatgcttgtttcctgcacttccaggcacctgcagtgtgggtggcacagccccagtggctctgggaagagcctttaggaaccagaatgactacaccagcaggtcctgggaagttgggcagagccctgggaggatgggcgggacacggccaggtctgccacagagagaaaagggccaaggagggaaggtgggcaggtggcatcgtgcagaaaggtaagatctgtgtgtgagagcactcttgtgagatttccacaaccatttattctacctggctttaatttttagaaacttaaatgttagaaaacactaattgatggccgggcacggtgactcgtgcctgtaatcccagcactttgggaggctgaggcgagtggatcacttgaggtcaggagttcaacaccagcctggccaatatggtgaaaccctgtatcaactaaaattacaaaaattagccgggcatggtgatgggcgcctgtaatcccagatacttgggaggctgaggcaggagaatcgcttgaaccagaaggcgggggttgcagtaagccaagatcgtaccactgtactccagcctgggtgacaaagcaagactctgtctcaaaaacaaacaaaaaaacaaacaaacaaaaaacactaattgagaggtataagcagaaaacatctggcatgactagctatcacagcctttccccaccaaagacaaaacaaagcagatcttggcatcagtgtgtgaatgtggcagcacacaggagacaacgaaactgggtcatcccaggaaaagccctgcagaaggtcccatcttcagccatagaatttttcccaggccttccttggatgggctcagttgggatgtttttcttttgtctggcttctttggatcagttacagtgttttgtgaataactacttcattctttgttattgatgagtaatactccattgtatggatgcatcacagtttatttattcactcaaatggccacgggggctgatttcagtctagggccgctggctgaattaagctgctgcaagcacataaggacaagtcttcttgtagacatgttgtcctttctcttgggtaaaaacctccgagtgaaattgctggtaagttaaagttccactttatatatactaaaataaaaagccaccaatctatttacaaatacaaatggtggtggaacttaccattgatattttttaaaaacaacaatacttgaatgatcattatcaaaagaatagaaaatactaagaagtttcaaaacataatttaaattatctgaaatagcttcaagtagcaacaacctttttttaaattataccttaagttctagggtacatgtgcacaatgtgcatgtttgttacatatgtatccatgtgccatgttggtgtgctgtacccattaactcatcatttacattaggtatatctcctaatgctatctctccctgctcccccaaccccacgacaggccccggtgtgtgatgttcccctttctgtgtccaagtgttctcattgttcaattcccacctatgagtgagaacatgtggtgcttggttttttgtccttgccatagtttgctgagaatgatggtttccagcttcatccatgtccttacaaatatcatgaactcatcattttttatggctgcatagtattccatggtgtatatgtgccacattttcttaatccagtctatcattgatggacatttgggttggttccaagtctttgctatagtgaatagtgctgcaataaacatatgtgtgcatgtgtctttatagtagcatgatttataatcctttgggtatatacccagtaacgggatgtctgggtcaaatggtatttctagttctagatccttgaggaatcaccacactgtattccacaatggttgaactagtttacagtcccaccaacagtgtaaaagtgttcctatttctccacatcctctccagcacctgtggagaacatattcttgtcaatacttatttgattgcaaagaacagaaatgatgttaagcaagaaaaagaagggattttctcagagggacacagaggtgtctctaggtgacaagggctaggagatgcagctgagcttcatggtaatgactgatccccacgtggccattctcattctctctcatctctcactctgcctctccctgggctgctgggccttttctctccactgcccctattctagtgtccctgctgcagaacatctcttgctggttcatggcacagcgtggcctccctccctgagttgtcctaatgcaaaagcatttgtgcacagcactggctgtgtgccgggaccctttgtttctattctcaaaagaaagaatctaactggcccagctctgctcagctctccattcctggttttatcaatgtggctcgaacagggtccctgacacaaacctggccactagggaagtgagcaggagtagacattcccggggagagtcgtgagtaggaaaactggcaagtgtggctaacatggcgcctccaccaaatgccttgctaaagaatacgctctacatctgctttctgaaaatgtagtgatatcttgtgaatacccttccatgacattgaaaatatgcctgcactgccatttggagggaccatagcctggtatcctctaacgtgatgtgccaatactgacttgacaaatcctctactgctaaacacttagatcaccttcaattattccctctaataaactataccttgatgaacatttttgtacataaatattttatttttcttaggataaattctctagaccatgatagaaccaatatccagtggcattatttaattttagcttcacaataacaccttgatataggtattagcacccctactttacagacataaaaactgaagtaatgtaaaagtagacacagctcttacatttaaacacctggggagcgagagaactggcattcaaacctgagtaggagtcagagaaagatcctgggtctgaaaataagccatggatgggcgagctgtgctgcagccagatggaggcccgactcaggctaaagggaaatgggtgtcaatgcttggtgcagcagaaaatgagaaagatttggccttcagatttatacacagaggttcttcctgtctctttctccagttagtgatatctcatggaggagttttctccacgctaggaaatggcttctcaatccaaagcaccctagaaagggacagcatctatggaaggtgcctcccctgcactagcctttcttactgctgcatttttaaccttctggcttgccctcctctggatccccctggggaacaggtggccatatgattctttccatttcacagaaaggaaaatggcactggagacataacccagtggccttccaagggacgtgggtgatgtcataggaggaacaaaaagaaggactttttgtgcctaaaagtgaaatcaacttcagcagagagtgggatgcccaccccctttctgggtcttacattcaatatcacacaagatgggtcggggctggaacctcctggaacctgactctcagtcatgggagagggtaaggcaggagccctggggatctgggaacctgagagggagtagggtcacccttgctgaggacagccactactggaaccagacaataacagaaaagaagggggaggggaagccccatcttgccatcattgctgaaaagcagggtataaagaaagagccccactgtgaaggtaactctccatcacagatcctgggatagcgaaggtcacagaagagaagggggcaaagctgccctaaaacagcaaaggcgacctggctctgggaccaacagaaggaaaagaggagaggactctgtttcctcaggttatttcctaagctggccagccctgccagaaacacccatcctccagataggccaggatgctggctggcattttctgatgaggctttccaggttctgcagataagtgtccaaaaagacttggcaagtgacccataaagatcacagggtttataaaacaaccaagcaccgttccgctctggcacgtgcctctcgcaaattcatattcttttctctacattctggagtctggatgtgtaagctttgactggagatggggttaggggaacaggatgaaatgctgatgtgggaagacagggagaagtcacagctcaagggaagcaattcccctgcagcccacacaaaattcatctaatatttacttaaaattagccacaccccagtccatgcctgatctgaggcctcattaggccataaagactcacgtcttatacaacgggactttgaaaggttgttgacaatgtgtattatgaaaacagctatgcttggattttcaaaatttttgcaccgatgaacttatacggactttttaaaatatctttgaacagaatctagtttgaggcgctaagaaggataagacatcagtttgaaaagagccctatcaggacaacaaaaattctgctaaaattgatttccataggtttttgaggaacaagtggtgtttggttacatgagtaagttctttagtggtgatttctgaaattttgatgcatccatcacccgagcagtgtgcactgcaccctatttgtagtcttttatcccttgcccccctccttcccttccccccaagtccccaaagtccattgtatcattctcatgcctttgcatcctcatagcttagctctgacgtattggtgagaacatatgatgtctacttttccattcctgagttacttcacttagagtaatagtctccagtctcatccaggtggctgtgaatgccgttaattctttcttttttatgactgagaagtgttccatcatatatctataccatagtttctttatccactcattgattgatgggcatttgggttggttccacgattttgcaattgtgaattgtgctgctataaacatgcatgtgcaaatgtctttttcatatgatgacttcctttcctgtgggtggatacccagtagtatgattgctggatcaaatagtagttctacttttagttctttaagaaatctccacactgttttccacagtggctgtactaatttacattcccaacagcagtgtagaatgttccctgatcactgcatccatgccaacatctatgatttttttatttttattttttgattatggccattctttcaagagtaatgtggtatctcattgtggttttgatttgcatttccctgatcattagtgatgttgagcattttttcatatgtttgttggccatttgtatatcttctttggagaattgtctattcatgtccttagcccactttttttatgggatttttggttttttccttgctgatttgtttaagctcactgtagattctggatattagtcctttgtcagatgtatagattgtgaaggttttctctgactctatgggttgtctgttgactttactgatggttcctgttgccgtgcaaaagctctttaaattaggtcccagctatttatctttttgttgttgttgttgtttgtttgtttgtttgtttttccagacgaagtctagctctgtctcccaggctggagtgtagtggcacaatcttggctcactgcaagttcctcctcctgggttcatgccattctcctgcctcagcctcccgagtagctgggactacaggtgcctgccaccacacatggctaattttttgtatttttagtagagacagggtttcaccatgttagccaggattatctttgtttttattgcatttgcttttgggttcttggtcatgaaatccttgcctaagccaatgtctagaagggtttttccaatgttatcttctataatttttgtagcttcaggtcttagatttaagtccttaattaatctttagttgatttttgtataaagtgagagatgaggatctagttttattctcttacgtgtggctagccaattaccctagcaccatttgttgaaaatggtgttctttccccactttatgtttttgtttgctttgtccaagatcattaagtatttgggtttatttctgggttctctattctgttccattagtctatgtgcctatttttataccagtatcccactgtttctgtgactatgaccttatagtatagtttgaaatcaggtagtgtgatgcctccagatttattcttttttcttagtcttgctttgtgtatgcaggctctttttttggttccatatgaattttagaattgttttttctaattctgtgaagaatgatagtggtattttgaggggtatagtacttaatttgtaaattacttttggcagtgtggtcattttcaaaatattgattctacccatccatgagcatggaatgtgtttccatttgtttgtgtcatccttgattttttttagcagtgttttctagttttccttgtagaggtctttcacctccttggttaggtatattcctaaggtttttgtgttttttttcagctattgtaaaagggattgatttcttgatttgattctctgctttgtcactgttggtgtatataagatctactgatttgtttacattaatcttgtatcctaaactttgctgaattctttttatcagttctaggggctttctggaggagtctttagggttttcaaggtaaacgatcatatcgtcataaaacagtgacagtttgacttcttctttaccgatttggatgccctttacttctttctcttgtctgattgctctggttaggacttccagtactatgttgaagaggaggagtgagagtgggcattcttgtctgttctagttttcagagggaatgctttcaactcttcccctttcagtatgattttgcctttgggtttgtcatagatggcttttattacattgaggtgtgtccctcgtatgccagttttgctgaggttttaatcataaagggatgctagattttgtcaaatgtcttttctgcatctattgagatgatcatgtgattattgtttttaattctgtttatgtggcgtatcacatttattgacttgcatatgttaagccatatctgcatccctggtatgaaactcacttgacgattgtggattatcttttggatatgttgttggatttggttagctagtattttgataaagattttagcatccatgttcatcaacccaaaactagttttcttttttggttatgtcttttcttggttttgatattagggtgatgctggattcatagaattaatttgggggttccctctttatcttgtggaatagtgtcaaaaggattgatatcaattcttctttgaatgtctggtagatttctgctgtaaatccatctggtcctgaatttttatgtgttggtaattttttaattaccatttcaatcttgctgcttgtaaatggtcggataagggtatctaattcttcctgatttaagctaggagggttgtatttttccaggaatttatacatctcttccagtttttctagtttatgtgtgtaaaggtgttcatagtagctttgaatgatcttttgtatttctgtggtatcagttgtaatatctctcatttcgtttcttattgaggttatttgaatgttctctcttcttggttaatcttgctgatggtctatcaattttatttatctttttaacatttttttatttgagaaaagcatatattctccccttgatttgccattagggaataatttcaggtcaaggcaatcttttataacttgcaatatgattgggagaaatatgtaattgagtggctagtgtaattttagtgttaatcttagctaaatctttcctgcaattaattccttcatggcctccacaaaccacctatgacatgctaaaactttctggcttgtcctgaatattcttctttttaaacaatcaaccattctttttagggcaagtatttaccatccatccttataattttttcaagatttccacaaactatctacaacatgcttaaactttctgacttgtcctaaacatctcttttaaacaacgaactattttcttttagacaagtatttaccacccaagatcctttcttatataaaatctctttcccttacaaccttcttttcatagccaggatatgacatattaccaaacccaataaaaagtccttgcgggctcagtgatagtaaaactttcatgcttcctttttgttggtaactattatttctgctgtaaggataataattaagcaaaatactatagcaatggaaactctctgtctgatattccagttagaaggtgttacagcttttgtctcattgcaaatagagtgagtatcgcaattcctgcaagtgtggtgtagtagataattttcatctaaattgccaagatataacatttcccttttggaggtctatgaagttacaaatgcaatcccatggataattaaaaccttcctgcaaatatgcatcaaaagtaagttttaatatctggcagtacatctagaggggaaaagtagaaatgacggaaagtaaaagtaggactgagtaggatgagcagcccttgctcatttatttatcctttatgattttcaccttaagatctcctatttcttcacattggtatccaggacgtttatccgggctgtcaaaggttgctctatcagctttctaggtttgactcgagtatgatgtgtccagaagttgatacctgtaacttttatcatgttttgattaatgttgtaccgtgatatcccagatgaggtccccaatatgaagcagctgcattgtctgggggatatactctggggttcatcattgtccaccaggaaaatttaggagatagacacatacgaggagtttaggagcagaagtttaataggcagaagagaagagaaagaggaacagctctctatatagagagagaagggtctctgagcagaaaagacccaaaacacatcaaatttatggtgaagcttgagtggaagaatggtgaaacattgatgctttgtgaaaatttcatggggacaatgacccaaagaaatcagcagtttgcaaatggataactcatttaagaacagatgagacaatgctgaaaatgaagcccatgacagtagagcatccaacattaatttgcgagaaaaatattcatcttgttcatgtcctaattgaaaaggaccaatgattaactgcacaaaaatagtcaacatattagacacctcaattagtttagcttacacaattctgactgaaaaattaaagttgagtaaattttctactcgatgggtgccaaaactcttgctcccagatcagcggcagacaagaacagaacttttcacggaaattttaatcaaatggtatctccatcctgaagcatttcttcaaagggttattacaggagatgaaatatggctctaccagtacaatcttgaagataaatcacaatcaaagcaaaggctaccaagagatggtgaggatccagtcaaagcaaaagtggaccaatggagagcaaaggtcgtggcaatagtttttgagatgctcaaggcattttgcttgttgactttctggagggccagagaattataacatctacttattataagagtattttgagaaaattagccaaagctttagcagaaaaatgccttaaaaaacttcatgagagagcctttgtccaccacgacaatgcccctactcatttctctcattaaacaagggcaatttccacactttcagtgggaaatcattaggcattcacctcacagccctggtttggctccttattacgtctttttctctctaatattaaaaaatctttaaagggcactcatttttttcagtgaataatgtttaaaaaacctgattaacgtggttaaattcccaggaccctcagtttttttagggatggactgaacaggttttatcactggtttcaaaagtttcttcatcttgcttatgttgagaaataaatgtttatctttaattccattttttcacaatatcttcaaagtcctctgttacttggcttgggtccctggggcacaaaatagacaatgcacaatttcctggagtgttgttgttattattcaaaaataaaacaagggtatctgtattagtttagctagtttgttcagcaacgaagtagcaaagactgggtggcttaaataacaaacatttattttctcatagttctggaggccagaagtacaagatcaatgtgtcatcagggttggtttctcttgaggttgaggcctctctccttggcttgcagattactaccttatttctgtcttttcacatggtcatctcctgtgcatgtgcaccccgggtgtctccttgtgtgttcaaattttctcttcttacaaggacaccagtcagattagattaggatccacccatatagcatcattttacctctttaaaggatctgttttcaaatataatcacattctgaagtgctggaggaatatgaatttggaggaatacaattcagctcacaacagcattcagattaaaaaacaaaaagtaaatcatttctattcacaggtaaaataatctgataaatagaaaaataccaaagaagccattaaaaaactattaaagctaataaaagcattcagcaaagttgcagaataccaaatcaacaaaaaagttttatttctacacattattaataaataacctgaaatgaaaatttagaaacaatgcaatttactatagtatcaaaaaatagtatgcttagtaataaatttaaccaagaggagcaacacttgtacactgaaaactagaaaactttactgaaataaattgaagaatacctaaacaaatgaaagacatcccatgttcatggattggaagacttaatattgttgagatggcaatacacacaaagtgatctatagatctattaatttgcacactttatgtatgtacattatatgtgaataacaaggaaaagaagagaaagaaagaaaacaaaaacaaagccgttttcatcacattttgagagaaaagaatccaaatggtatccaataagtccttagttatctttccaactcccctctcctcttccttactatagcatactcccactttatagattctgacgacagaacaagatggaatcagagattcagtatttgtgtatctgaagactattatggtagtcttaaaaaaggcttgccccaaaaatggaccagacttccctttacgcccacaggatgctcctaggaccaaagatagatgccagaaaagcttcaactcagtggtaaccagtgctcatgcctgagaactgcccatggaaccatatgccatgtggtgcatcatgctcccatccctgcctggggccaaacagaaccttaggtacttctgtctggacactgcaaaaggcactgtccagttctactaattggaccagaccagaagcaactcctcctaccttgactggttgctgctgcctgacccatccacctctgcttccccagtgggatcaggcacacagtcatcctggagaatttcagccagtggagcttccgtgcaaaattctgtgaccctgggtggacaaaggtggtgatgctaccaaagaacgatgtctagggaggccaccagggcatctgcagagaagcagagagcttccaattcctaatagacatgactcaaaccttaagagatgtcgagatatcaggggaggtgtgcagaggaccctgtaactgatgcatccctcaaacccccttcaggaatgaagagcatagccccagctccagagccctcagctgcatggtcagttcctccatgattgcctggcctggagagagcccccatccaaagttacgccttcttctggggatggcatccacagactgctcaatgtggcccatgagggtctgggccccttgtccctccaagacaactctgaagggttgtctcagccttcaaagtccccatagaatgggaaggggtctcagcagagtcagcatcacagcctgccactccctctacattgctctgtgtctttctcgtcccttcctagcagtgatcccaggagcacccttaatgatgctgaagaagaaagagttaaaagatgagacaaaaagtgagtgtcctttcagctccccaagctgtaagcagctctttccttagcaacctaacatatcggttcacagtttctgtgtttattttttctcccagccagagcaaatctagactgcttgctttgggctgaatgttgaagaaggcagcactgttggcaggcagaggggctgtgggctgtccgtcttcctcttcctccgctaagggaaacaatggcaggatccagttgcttatctgcctgcttatctagcaagctgctgggtgtctggatcctgcaggggcagtgggggagagcccttagctcagcactgccctcctgtgctggggcaggcatggcaaagcccatgaagttgcttccctcagataaccttgtgtttccacctggagaggggaaataaagacacatcacatcattggattatgaggagtaaattatagaacgcacacacacagtgatggcattcaaaaaatatcagctgtggccaccactgtctcagctctttgaacttggacttgcaggactggcctcacttgcaggtactgtggcaaatttctccccatttacagtgaccttctgttgacactaaaatagctgtaggtatgcatggtgagaaaatgttagactttatccaagagtcaggttgcaagaccaagcttctctacttcctggctatctagctttaaacaagtcatatatttgagcctccattttctcacaaactcatttctcatggatagacaaacttgagaatctggtgaaataactcatataagaggtcttgacacccccagcaagcattggctgattcgaagtccacggtgtaaaatgtaagaaggatttggttatgctgataagtaaatttacctgatcaggacaggtagaggagctcaaactgacaaacaatacagtggctgggaagagaggaagataacaggaagaacctgttatctgaatggtgggctgaggagggcattcctagaaaaagggaagacactgtcctgagtgtattctgctcagacccatctactgttttatgaaacaccctcctatggctccatttcctcaacacaatggcctgtcttgtgtcactgaacatgttctatggcctgcctgtaatgtcttccttctcccctcccatgctcacctccaccccagtaaactcctattcatccctcaaaaccccagctctgccatcaagtcttccaggaaggctctcccagcaccatcctcacctgcaggtgggttttgcaccacatctatgctttgacctgggctgctgttggacagttgccatgagcccagacctctctgagagcatgtggagcaccctttatgacacaaacaagagctcaaggatggtggctggggttcagtctgccgctgcaaataccaaaagctgtcctcattgagtcatccctcccagagcaggaagagcagaggttctgggaaacaaccccaaggagagagacagggcatttgtgagctgtgcagcctccctgctgggacatagggaactctagctggagatgagcagggcctgagtctgagggtggccctgctgaaagcacagtaataggagttataatcagctaagagcaggaaatctactttatttttctaatgttattctttgctttctagataaaacagcatgtaagcatctctgcagttgctgtccccagagcccacttcctggatattgccagctgcctggaccaacctttccgaaagatcagccaggtcacagtgagggtcaaaggtgagccacgggcctcagcagctgctgagtggatggtgcgtgggactcaggaagtgacgttctctccccgcccagcccccttcctcagtctattgctccgaatcctggaccacacactgcgtgctgaggctccatcgctgtgctgggtgaggggtggaggactgtccagctgacagccacccaggaggcctgcccaggagacccagcccagcctctccttggaacctgaagaactccaggcagctgatgggacactggggcccaggtcagcccctccccttccctgaggttgcctgaggacgccttcactgttctagagaaggaggccctccccatggctggggacagtcacagcagctgcagacagatgatgggagggagcattctttccctaaccctagaggcgggcgagcattcaccaagtgttgttgttaaagaaaaaaagaaagaaaaagaaaccaggattgtacctgaggtcaggcagacagtgctcaactcagcactgggaagattgctagaagccttgggcctatctaggaagactgggccaacatgcgatcccctctgcaaggtggaggccatgcacctgcctcctgctcctgagctccggtatcctcactgtgacccaggccccactgcagcaaagagacactgggaattagcccttctgtcccctccttgccagaaggtgggaagatgtgttggttgagggcctagaatttttttcatccccaaagactttctttttttaatattattatactttaagttctagggtacatgtgcacaacgtacaggtttgatacataggtatgcatgtgccatgttggtttgctgcacccatcaactcgtcatttacatttggtatttctcctaatgctatccttcccccagcccccaaacccctgacaggccctggtgtgtgatgttccccaccctgtgtccaagtgatctcattgttaaattcccacctgtaggtgagaacatgcggtgtttggttttctgtccttgtgatagtttgctgagaatgatggtttccagcttcatccatgtccctacaaaggacatgaactcatactttttatggctgcatagtattccatggtgtatatgtaccacattttcttaatccagtatcattgatgaacatttgggttggttccagctctttgctattgtgaatagtgccacaataaacatacatgtgaatgtgtctttatagtagcatgatttataatcctttgggtatatacccagtaatgggatggctgggtcaaatggtatttctagttctagatccttgaggaattgccacagtgtcctccacaatggttgaactaatttacactcccactaacagtgtaaaagtgttcctatttctccacatcctctccagtatctgtagtttcctgactttttaatgactgccattctaactggcatgagatagtatctcattgtggttttgatttgtatttctctgatgaccagtgacgatgagcattttttcatgtgtctgttggctgcatagatgtcttcttttgagaagtgtctgttcatatcctttgcctactttttgatggggttgtttgtttttttcttgtaaaattgattgagttatttgtagattctggatattagccctttgtcagatgggtagattgcaaaaattttctcccattctgtaggttgcctgttcactctgatggaagtttcttttgccttgcagaagctatttcgtttaattagatcccacttgtctattttggcttttgttgccattgcttttggtgttttagtcatgaagtccttgcccatgcctgtgtcctgaatggtattgcctagcttttcttctagggttttgatggttttaggcctaacatttaagtctttaatccatcttgaattaatttttgtataaggtgtaaggaaaggatccagtttcagctttctgtatatggctagccagttttcccagcaccatttattacatagggaatcctttccctatttcttgtttttgtcaggtttgtcaaaaatcagatggttggagatatgtggcgttatttctaagggctccgttctgttccattggtctatatatctgttttggtaccagtaccatgctgttttggttactgtagccttgtagtatagtttgaagtcaggtagcttgatgcctccagctttgttatttttgcttaggattgtcttggcaatgtgggctcttttttggttccatatgaactttaaagtagttttttccaattctgtgaagaaagtcattggtagcttgacagggatggcattgaatctataaattaccttgggcagtaaggcctttttcacaatattgattcttcctatccacgagcatggaatggtcttccatttgtttgtgtcctcttttattttgttgaacagtggtttgtagttctccaacttcacaccccttgtaagttggattcctaggtattttactctccttgtagcaattgtgagtgggagttcactcattatttggctctctgtttgtctgttatcagtgtataggaatgcttgtgatttttgcacattgattttgtatcctgagactttgctgaagttgttcattttgttatttacccagtagtcattcaggagtaagttgttcagtttccatgtagttgtgtgtttttgagtgagtttcttaatcctgagttctaatttgattgcactgtggtctgagagacagtttgttgtgatttctgttcttttacatttattgaggcatgctttactttaaaatgtggtcaattttacaataagtgtgatgtggcactgggaagaatgtatattttgttgatttggggtggagagttctgtagatgtctattaggtctgcttggtgcagagctgagttcaagtcctggatatccttgttaaccttctgtctcgttgatctgtctaatgttgacagtggggtgttaaagtctcccattattattgtgtgggagtctaagtctctttgtaggtctctaaggacttgctttatgaatctgggtgctcctgtattcactggatatatatttaggatagttagctcttcttgttgaatatatccctttaccattatgtaatggccttgtctcttttgatctttgttggtttaaagtctgttttatcagagagtagcattgcaacctctgcttttttttgctttctatttgcttggtagctcttcctccatccctttattttgagcctatgtgtgtctttgcacgtgagatgggtttcctgaatacagcacactgatgggtcttgactctatacaatttgccagtctgtgtcttttaattggggcatactacctatttacatttcaggttaatattgttatgtgtgaatttgatcctgtcattatgaagttggctggttattttgcccgttaattgatgcagtttctttctagcatcgatggtctttacaatatggcatgtttttgcagtggctggtaccagttgtttctttccatgtttagtgcttccttcaggagctcttgtaaagcaggcctggtggtaacaaaatctctcaacatttgcttgtctgtaaaggatttgatttctccttcacttatgtagcttagtttggctggatatgaaattctgggttgaaaattcttttctttaacaatgttgaatattggccctcactctcttctggcttgtcggatttctgctgagagattcactgttagtctgttgggcttccctttgtgggtaacccgacctttctctctggctgcccttaatatattttccttcatttcaaccttggtgaatctgacaattttgtgtgttgaggttgctcatctccaggactatctttgtggtgctctctgtatttcctgaatttgaatgttggcctgccctgctagattggggaagttctcctggacaataccctgaaggttgttttccaacttggttccattctccacatcactttcaggtacacccatcaaacgtagatttggtcttttcacatagtcccatattttttggaggctttgtttgtttctttttactcttttttctctaaccttatcttctcactttatttcattagtttgatattcaatcactaataccctttcttccacttgatcgaatcagttattgaagcttttgcatgtgtcatgaagttctcgtgctgtggttttcagctccatcgggtcatttaaggtcttctctacattgttttttctagttagccattcttctaaccttttttcaacgtttttagcttcattgcaatgggttcaaacatgctcctttagctcaaagaagtttgttattaccaaccttctgaagcatatttctgtcaactcgtcaaattccttctccatctggctttgttctgttgctgacgaggagctgtgatcctttggaggagaagaggcactctgatttttagaattttcagcttttctgctctagtgtctccccatctttgtggttttatctacctttggtctttgatgttggtgacctacagattgggttttggtgtagatgtcctttttgttgatgttgatgttattcttttttgttcattagttttccttctaacagtcaggtccctcagctgcaggtctgttggagtttgctggaggtccactccagaccctacttgcctgggtatcaccagcggaggctgcagaacagcaaatattgcaggtggtaaatattgctgcctgatccttcctctggaagctttgccccagaggggcacccacctatatggggtgtctgtcagcccctactggaaggtgtctcccagttaggctacatgggggttagggaccctcttgaggaggcagtctgttcattctcagagctcaaatgccatgctgggagaaccactgctctcttcagagctgtcagactgggacgtttaagtctgcagaagtttctgctgccttttgttcagctatgccctgcccacagagctggagcctagaggcagtaggccttcctgacctctggtgggctctacccagttcaagcttcctggccactttgtttacctgctcaagtctcagcaattgtggatgcccctcccccagccaagctgccacctcacagttcaatctcagactgctgtgctagcagtgagcaaggctctgtgggcatgggacttgccaagtcaggcacgggagagaatctccttgtctgttggttgctaagaccttgggaaaagtgcagtatttgggtgggagtgtactgtttttccaggtaccatctgtcacagcttcccttggctaggaaagggaaatcacccaaccccttgtgtttcccaggtgaggcaacacccggcctgcttcagcttgccccccgtgggctgcacccactgtccaaccagtcccaatgagatgaaccaggtacctcagttggaaatgtggaaattacccatcttctctgtcaatcatgctgggagcggcagactggagctgttcctactcagccttcttggaacagagcccccctcacaaaggactttctctggctaactctgatgcttttctgagttcttacctaaatttccccttctccttctgtggccctgccagttttgttttgttttgttttgttttgtccttatcactacccttgctgcctcctcaaattatccagagccactgttgttttctagaacattggcaagcacgttgatagagtgcccacattgtactgaactctgaggggaatagtctcgtccccatcactcaggtggggaaactgaggtgaggttagtttaaagtgggtaagcagtgggtttggaattggagctctggctggctggctcatgtccgtgctcttcccaccacagcaggaggccactggaggctccaagggctctgaaatgttgagaacttccctgcaggtaccagcgaagagggcaagaacacagcactacttccttggatactgtttccctcctcagaggggttttctgagctgccctgggtcctgtgaggaaggtaggaattacatttcactagggaacagccagggtcacctccttgcctgaggccccaccatcccatcagcctggatgggcctgctcagcagccacactcgcccctaggccgagaaggggtggggctcggttccacagagtctcccagggcctcaggcaggtactctaggctgattccatctccaggttcgcaagtaaaaaaaaagtcaactgcccaaaagacttctcttagaactcacagcaggttaggctggcaggtggagtctatgctcgggtggtcccatctgccaggcctgatgttccaggtgaagagattggtgagcaccaggtgaccccacccaggtgcacgtggctctgtcgggtacaggcaagtctctgcccaccaaagggacaccacaagggcccaggcaaagcagagcctttctcactgggtgtctgctggtgctgatgtcaccaaggaacacaccccgggcagcttaaaccacagacgtttattcttgcatagggctggaggtcacaagtctgagatcaaggtgctggacagcctggctcttcctgagggtggctggcaggtccagtgcaggcctcccaccttggctggtggacagccatctgctccctggctctccatatcaccttccccttgtgcctgtctctctccagatctccccttcctgtaaagacaccagtcctactggatcagggcccacccgtgtgacttcacttttacttgagtacctctcacagaccctaactccaaatcaggtcacttgctgaggtactgcatgtgaagactttgacatttgaattttgagggggccaccgtttaacctgaaccaccaaggacagagccaaagaccctgggtgacaggcccagaacaggacctggtggaggctcttctttaggggagagagggaaatgggagccaccactggcagagcctgaaggcagggcagccagaaagaagctgtgggagtccccaccatggaagaccctgccgagcatcctgtgtctcctgaagcagaccctgacatgaggactgggggcacgtgtttattaagggcgatccccggaaggaggagataaccaggtagggaaggagggaaccccagggcagggctctagagagagaggatgaccctcaggagcaggagggtgcacctgaaaccagacccagcaagagatggaagccctgggagcagccccactccaggtcctctgcaggagtgacccagctgccaccaggctgccctgcccagctcagcaggccctacgggtgcagggaagcagatgggcagtgagatctgggaccggtatagaaccacagctgccacaactgcccatggctccctcccttctttgacgtcagagtgagcagggcggtttctgctgccttcgcattccagccccacacacctccctgcagcctggcactggaaactgctgagccatgcagggcagcctggtggcggctaggacacttctgcagaggacctggagttgggctgctcccggggctcccatctcttgctgggtctgttttcaggtgcaccctcctcctccaggaggcaggggcaagaccagcttcagcccttcttgctctccatggtctgtatatggacagggtgtgggcccggggagacagttgtgtggtgtgtgcattgtgtgtgtggggggggttgtctgtgtgtctgtgaatatttgtgtgatatgtgtgtagtatgctcatgtgtcatgactctgtgagggtgtgatggaagagtgtgtgtaagagagaagtttgagtgtgtgtggtgtgtgcatctggtgtctgtgggtgatgtttgtgtacatagtgtctgtgtgtgtgatgtcggtgtgttgtgtgggtttgtgtgtgtatatagtgtctgtgtgtgtgatgtcagcgtgttgtgtaaggatttatgtgtgtgtgtggtgtctgtgtttgtgatgttggtgtgttgtgtgtgggtctatgtttgtgtgtgatgttggtgtgtgtgatatcagtgtgttgtgtgtgggtttatgtgtgtgtgtgtgatgtctgtgtctgatggtgtgttttgtgtgggattgtgtgtgtgtgtgtggtgtctgtgtgtgtgatgtcagtgtgttgtgtgtgggtttatgtgtgtgatgtcggtgtgtgtgatgtcagtgtgttgtgtgtgggttgatatgtgtatgtgtgatgttggtgtgttgtgtgtgcatttatgtgtgtgtggtgtctgtgtgtgtgatgtcagtgtgttgtgtgtgggtgtatatttgtgcatcatgtcagtgtgtgtgatgtcagtgtgttgtgtgtgggtttatgtgtgtgtctgattttggtgtgttgtgtatgggtttatgtgtgtgtggtgactgtgtgtgatgttggtgtgttgtgtgggtttatgtgtgtggtgtctgtgtgtatgatgtcagtgtgttgtgtaggtttatgtgtatgtgatgttggtgtgtgtaatgtcagtgtgttgtgtgtgggtttatatgtgtttgtgtgatattggtgtgttgtgtgtgggtttatgagtgtgcatggtgtctgtgtgatgttggtgtgttgtgtgggtttgtgtgtgtggatgtggtttctgcctatgggaggaggtttgctcacagatggaggagaaggagctctataggcaaagatcccagggccgtggaggaggagacacagtcctgagaactccttcctctgaatcagaaggacaggaaaggtgggattttaaaggaacagagaaccctggtgggagaggtgaatctgagctcctcgggccatcgggtgtcctgtggagcagaggcaggcccgtgagggtgattttcagaatgctgcctgcttctgagagtgagatgaagaccctctggggtcccgttgatgtcaccaatgtcgcctgtcttgaggcatctctggtccagacctggctgggagagagagctatgggtggagatgcactgggtgggtgctggtgggaggggagggctggcttttcctcagcccccagacttagagaagatcacacgcaagagcttggaagtcctgggaggaagtatgatcccgaatcctggcacacttgatcatgcgtgacagggacttaagaaagcccctaattatagccgtgtggggtttgtctcccttctgaagcttggcgcccgtgtgctcaaggcaagggcgtgaccaaggtaagagaccccttctctcccttaggcagaagtcctagcagagtatgcccacgctggttagtgctgctgcaaagatgagccgaagaccatgagagacctccaggtggtccttctggggagaagaaatgggttttggccccaaatccttctgctgcatttttcccctatccctgggaagccatgagacctcaaacctgtgttcccaaggaggcgagctgctgttcccaggtgatgatatgatgtgcttggggaaagtaagtggctgccagacatggctgagagctgttgtcactgccgtcaagtgcatgtctccaagccatatcacacggcgtccctcgatgtgaggccacatggcaagtgggccgtggatctccctctgccctttgcaagcacgtaagacagcagattttgcagataccttgtggcgcaggggaatttcctttggccaggtctgaagaaataaagcagcaggcaccgagaacaaagccaaggctttcaaaagacaaggagccaaaaaacttactcaaaataaaagtagttttaaaatgtctctgccattggtagtctcattttctttttaatgtaggaaatagtcaagtattaaaatgaccaaaatgaaacaagtgcctcatggactgagaaggaaggaggaagataaaaaatgaaaccaggacagagaagagagggaggttctgggtgtatttgctttgggattacatgtgcgcatgtcttgtttttcccttttatatctccctcatctgaaatatgtagcaaagaaaaatttaagctgtaagagggaaactttttccaaacagtgaagtttaccaaactgtggcctgagatctatattcacattctaaaaaaccatgcccaattccccacgctaacagcagctccagaccaaagagcagctcttgtcttgaccaaagtgaataactatcttaacacgaggtgactagaaaccatctgtcttgagaccagagaggagacctgtggtcagtgacgctgttcagcaaatacttgccattcctgacctccaggctcaaggagggattggccaccctggtcccctaggaagatggggccatgtgctggctctggacaatggtcatgatggaaatggcatctgctcttgcaggccaaagagtttaattgcctccagagctctccttccctctgcaacagtgacctacaatgtccaggtagcagtccttccatcaccttgaatctcagagtaagaatgacatggagtagagccccccaggtaagctgtattgaacatgtaacatgtagatgaaatcaactgttgtttaaattcactaagtgtgaattacatagcacaactatacttatcttaattgacacaagatgagtttgtttcttagctgaccaatagcaaaaatccaataaacagatgaataaattaataaatagatggatgaatggatggatggatggatggatcagtggatgggtgggtggatagatggagctgttagatatggctctttgtttataaatctcaaccacaaactttgtcacttctccagaataaaactcctacatggtagggactctgtgaatgttattaaaatgagagagctattagaagccaagagatgaggctgatttttacctctggctttagaatatttggtgccactgtgtataagctttacccaccattgacaaaaagggacccactatggacacctcaggaagttcttcagcctgcaggcacttctgttccgggtagggattcaggttatctaaactccaaccaagtgtgaccaataactcttgttgctcctatagcctcagcaagaacacaagcaaatatgctctcatttttgataaaaagcatgtctatgattgttgatgtgcaaatataaagagccaagcatggagaaagaagaacaagagttaaaacatacctcagtgaccaccaccagcccttacatacctgccctgtcctggtccccttctccaggtgccctcttcaaagtatcccaaaccagagaaacaatataaccagtgaccatcagggagatttcagttccagacctaggacctgcaatgaatttcaggggaaaagtgctttccttttttatcatctactcagaggatgttgactgacagctaaaactactcaaagggtacaaaattcagccttatggtttcaagaatagtcaaccctgcatgtgaaatcatcagagaatggagatttgccccctgtccaggcaggctcttaaatttgcagttcagatataaaaaaaaggtctcacttgtttacttatctgttttgcatatattttttattttctgttgagtatgatatttgatataaaaaaaaaaaaactttttagctgaggatggcttctggggttagccagttcttagagacagcagaagactcagctgggagcatgcctttgatgcaccaactaacccatccagagccattcccttctatctggcctgtacatctcaaaaggcaatattcctctaccttgacaagcccagggccagctaccaggcaactagagaccaccaaaagccccctaaaattattccaattggccaattctaaattgttcacactgccctgttttgccttttccatcgaaaccaaaataaggactgaggtccaagctgtccctagctcctgtcttctgccatctgaccaaagcttggtgcttccaatgtggccctgagttgtatgtggtggcctcctctctggaactgtgcgtgtagtcaactttgtctttctcacgtctccttggtggtggcatctgactgattatctcataaagaaacacaaaacattactgtttctgtttctgatctttaaagccaatgagaatagacatgcccagtgctgctgggcagggcaacaggcgctcagcactgctgtgggaaaatgaactcctgcaatctttctggagggcaaacatcaacaaggcttgccaacctttaacatgtgcacacactgcctcccagccactccaattctaggaatttatcctaagaagataatgagttaattgcaaatatgaatatccaaaagtgtttatcactgtttaacatagaatcatgaaaatttggaaacaactaccatggactatggtaggggatggaataaataaactttgatgccatatgcagtagaatgcataaaacctgcatttgaaaaaagtattgtgtgccacgagaaaatactgtatgataaagatcttttaaggctctatgacattttctgtatgattccgtttaattgtgtaagtctgtatataaacaatgctattaacatcaacatgctctgtggtgggttataggagatttttattcacgtctcagtactcttctgtattttcaaattcttgactgtaaaaatctacttctctagaataagaagaaaaaatctataattttttaattgatggggaaacaaaccttgaatgataggaaccaacagttttgtcagttattcataattaatgctatcagtatttagtagttctcttcaagcatgcaggtttacaaaacaccactggtttatcatcttgtgaatcaagacccattttcttgagtatagaggctctggcatggtgaaaacactgaacacttaattcacaagagctcaagcaagacttggcaaaaaaagaaaaaaaaatcaaatcattttatggataaagaacaaagccaaggtggagatggcccctttctcttctttgttaaaactgatcattgatcattgatggaacatggaacttggggtttggggggatttgtttgtttgttatttgtggtggggaaaaaagttttcaaaataggctttggcatagccctgcctggggtcaggctgaactgtaaaagcatttctatgattgttgagctcactcagtagactgagtgtgaagggctctagatcccaagacggtccagagaagtcgtcgtgcatatgtaggcagctcacacacctctgacttcatgcagcgataattagctcctaaactcagtttcaatttgttcacgcaactcttaccactcccaacctccactcatcaaagatctgggctgggtgtactcagtggtgttaatttggtgtcatttatgttcagacattaagcaacgcttatgggataaactaaaatcttgtccctccctgggctgttggcagagtagcccacacaatcagcacatctcattgccaactggcaccagctgctggacccctgcttctgggtgataaacactgaagaatgtgaacgttacaccaggaacacttgtcattcactagcttctggcaggagccagtagaatcccttcaaaccccttcctgcataacccttaagctacttatctcctgggccacatcaggtgatgtcatcagatgtagacgtgtatttacaagttcattacccaagactttgaaactgtctccacccccattcccaaaatgaagatgttaacgtcctcttaggagaaaatggagaagtggctttctccaaaagtcattcttacccagaagactattgggggtaaacattcaggccagaccgaaggtactgttgtcttatgctttgatttggtttgtttttcctgttttctggtcaattcctgtggctctttttcctggggcctggctttggaggcaagcccaggtccatgacctccagaccatgcaatcaagcatgactgggatcttcactaagaggaggctggaacctgagagaggtgccttccatgaagctgggagagccccaccagcactgggccatggctgtggagtttgtggagactgccatcaatgagataataataataaagacacactcaaatctaagtggataaaaggcttaggctgtatccagctttcttttaagcactttacataattcatctcatttaaggctccaaataacatcattgaagacaagattgtattctagacccacacaatttagaggatagacagaacccaggaactttcaaaataccagggaaatgtcttttaaagaggcagaggcagctcctaaaaaatattcgattcccatacctgtgagacctatgcaagcacattggaaaaatgatatgcaatataatacttattatattggtattgtggggattgttgttatagtcatgttatagaaaactagctcaacataataaaggttatatataaaaaacccacagttaacatcatattcaatggtgaaagactgaaatattttcctgtaagatcaggtagaagaaaaggatgcccattttcaccactttttctcaacattgtatgggaagactgagccagagcaatgaatcaagaaaaataaataaaaagacatccaaatggcaaaatagaagtaaaattatctctgctcacagatgacatgatcttttatgtagaaaatcctttagatcacatacatacacacaaacacacacacacacacactcacactttagtaccttgaagtgtttccagttccttcaaataaagttaggttgttgatgtcagatcttctgttttaatgtgttaacagctataaatgtttttaagttaaaaataaaaaaatgaattcagcaggatagaaaattcagaaagttgcaggattcaaaattaacatgcaaaaattagttccatttctatacattaacaatgaataatctgaaaaggaaattaagaaaacaatcccattgacaatagcatcagaataaatattttattctaagaataaaatacttagaagcaaacataaggaggtaaaagatttgtacactgaaagctaaaaaaaaattgctgaaagatatttaaagtataagtaaatgaaagaaaagttctgtgttcatgaattggaaaacttaatattgctaagaagtcagtactacccaaaatgatctaccaattcaataaaatccctgtaaagatcctagtgactttttgtgcacaagtacaaaaatctattctaaaattatatgaatctcaaaggacctcaaataaccagagcaatctttaaaaagaggaacaaaactgaaagtctttcacttcttgatttcaaaacttactacaaaactgcagtaatcaggacctctacctttcaccatatacagtcaccaactcaagatggagagaagatgtacatgtaagacctcaaactagaagaatcctagaagaaaacctaggaaacaccattttggacatcggccttgggaaagaatttgtgactaagtcctcaaaagcaattgcaacaaaaacaaaaaatgacaagtgggacctaattaaactaaagaacttctgcatagcaaaagaaactgtcaacagacagcctccacagtgggaggatatattcacaaactatgcatctgacaaaggtctagtatctagaatctataaagaatttaagcaattgaacaagcaaaaaaagaccccattaagaggtgggcaaaaaacatgaacaggcaaattttaaacaaagacatataagcagccaataaacatatgaaaaagatggtcattgtcactaataatcagagaaatggaaatcaaaccataatgagatactatctcacaccagtcagaatgacttttgttaaaaagtcaaaaaacactgggcaaggtggctcacgcctataatcccaacactttgagatgccaagatgggtggatcacctgaggccaggagttaaagagcagcctggccaacatggtgaaaccctgtctctactaaaaatacaaaaattagccagggctggtggcaggcatctgtaatctctcagccaccagagaggctgaggcacgagaatcatttgaacctgggaggcagaggctgcagtaagctgagattgtgccactgcatgccagcctgggcaacagagcaaaactctttctaaaaaaaaaaaagtcaaaaaaaatatcagatgctggtgaggctacagagaaaagggagcacctatacactgttggtggggatgtcaattagttcagccactgtggaaagcagtctagagatttctcaaagaacttaaaatagaactgccattggacccagcaatcccattactgggtatatacccaaaagaaagctaattgttccaccaataagagacacacgcacacacacacacacacacacacacacttgttcattggagcactatgcacaagagcaaagatatagaatcaacctaggttccaatcaacagtggattggataaagaaaatatggtacatatacatcatagaatactacacagccagtaaaaagaatgaaatcatgtcctttgcagcaatatggatgcagctggaggccattatcctaagtaaattaacacagacactgaaaaccaaatactgcatgttttcatttataagtgggatgtaaatatcaggacctcatggatataaagacagcaacaatagacactggggactactagagaaaggggagaggtgggtacgggttaagaaagtaacttatgagtgctattctcagtacctgggtgatgggatcatttaccataccccaaacctcagcatcacacaatagaaccaggtaaaaaatctgtacatgtacccctgaatctaaaataaaagttgaaaaaacaaactacagtaatcaaaacattgtacttacataaagacagacatacagaataatgggatagaatacagagttcaggtttaaattctcacatatatggtcaaataattttgaatgagggtaccaaaaccattcaacaagggtaaggacagtctttttaacaaatggcactggaaaaacacaatattcacatgtaaaagaacgaagttgaacccctaccttaactatatacaaaaattaactcaaaatggattaaagacctaaatgtaattactaaaactataaaactcttagaagaaaacatagaggaaaccttcacatcattggatttggcaatgatttatggatatagcagtaaaagcacaaacgacaaaagaaaaaatcgataaattggaatacttcaaaatttaaaaatgttgtgcaccaaaggacactgtcaacagagtaaaagcaatccacaaaatggaagaaaatatttgcaaatccatatatccaataagagattaatagccagaatttctacagatttcacaactgaaaaaaatgaaaacgaaaacaaccggattaaaacattagcaaaggacttgagcagacatttctccaaaaaatatataccaattaactttatgggatttttccatcttggtaagaacaggcactattcacagctctgagtaagcttggggcattgctcaatctaaatctttcagatgcttctttccccagccttcaacagaacccattaacaatttgctgaatatttgagggggaccctcggcatatcttcagagctctcttgcccactgtctccatgcacgtgtctcctctttggtactcatcctatcagttctagtcagtgggttctccctggactctccactctgtgtcttcaactcagagtctgccaggctccagctggcttctccttccttgtatgtattctttttgcttttacagagaaataaagtgtcacataatgctaaggtaaacaaaaacccacctttccagtgccatttgttaaacagactgtccttactcttgcctggaaactctcaaagcagtaactggggcaatcatatgagttgcctcatttcttccctgtctctcagggctccctgtcctccattgcctgatgctccttgtcttgaaactgtcattttatgtatttggtctagctttttggttttgttttgttttgttttgttttcaggtgggaatataaatccagtccctgttactccatcttgcacagaaacagagttctgcccatgaatctttaaattatgattaaaaacaatctttcctaaggaaaggaagtaattttggtgagagcttttcttccccagcgacatttcaaaagaaatgtgtggccaagcatgtaacgggatctcctcatggggaactctatctctgcttggtacccgaggagaggatctgtggcatgaaagcaaagctatctctaagttgatgctgcaggaagcagaatctccccaagaaccagaggaggcagccccaatgttcaaaaaagctcaccacccatatgtgacctctcttagttcccatgcaggaaactgcttccactggatggagaagataaagcctttaatcagcaagaggtggcagatcattcattcatccctgcaaacctggggttaaatcacagctcatccttggagacaactgaatccaatctttttgcttttacagataaataaaatgtcacataatgctaaggtaaacaaacacctacatatcatgaggtcaacatttccagtgagccctaggggttatagcagtggctgagaggattttacagaagacagggaggccagagggaagacagagaggactccaggcccattcctccttcagtcaaagccgtttattttatatgtgaagaagatttcatctgaaaaatcatggatttgatccaaccgctgcaattttcagatgaagaagaaaaatctgtaaaagacttacccagggtcaggcaggaagtttaacatgcagcctgtgatcagaaccccgatctcttgcacctctgtgtgatacttttacatctgggtcacagaaggatgctggtgaatggaacagaggccacaggggtggaaatccctgattcctaaggcaagataatgcagacttcacagacttgtcatgaggaaccaagaagcagatgaatgcagaatgctttgtgaagagtaagaagcagcacaaaccccaggaatttacaacaactgttcttacctaccagaccactgccacccaactgggctgacaattccaagcaggctgcttctcaatccagcatggcacaggacaccgacagccccaccggggcattttaaattttgtcttgataatggttttcttcacagcagtttgatctggggataactctgtctaccatatgacttcaaagaagctatgcatgacctgcaagctgagtccttcccaaggttgtgcttgcaaggggaaagggaatacgagaggggaggatgctgaggatctccgtgggcaaggagtcccagagaaaggtgtgagtttccaaacaacaacctgagagcattgggataccttgtctgcttcctcaaagccagcccagaagtctaatacaaatggactacctgtgaggccccagagcagagcttcacaaacaccaaagaacaggtttcctatgctctctgatcactctgcaattaagttagaaatcaattgaaaataaatgtatgttccttttgatatagacagttgtgtgaccacatgaggtttgtacagtcccaggacccaaccccaaaggttctgggtgaacccctgattgaatggttattgattgactaacaaattgatgtttttgcttgtttgtatttgttggagtgaaacctgtagccatgttatgacctctgcttagactgcagagcagctcagcaaagcaccggtttgtttgtttgtttttaattcatcatctacacacaatctctacatttttatagactattttagaggagttttagtttcacagaaaaattgagcagaatctttttttaaataaaaaacacattgaaagtaaaataaacctcaattttagacccagtaaaaaaaactaccaggcatgcaatttagacgtcttcattcacacttctgctttcattcacacttctgccttcattcacacttctgccttcattcacacttctgctcagcaaatgtgtggtgaggatggtgctgtgcaacgtactaagatgatgggaggactggtccacagccgcgtgcagggcaacagggtggagtaagtgcgcagtggtggctgcgcttgaggctgtggaatttggtggccaggccagccaccccatgatagaaatctacccgataccgacgtacacagtgaaaagccccttctgccgtgcactgaagccacgatgatgtaagtccgagcagccaggtgcacaatgggggccgttctcaagggcagggcatctggtccccatgaacatactcagggaccaaacctcagccattggaggggaaaggagctcccagttcaacacaacatcaacactgggatggtccagtacagcccccagtgattcatgtctaagccctatggatgtctgcagcaaggtgatagaagagaaaaggctgctttactataaatcattagggtgtagcaatcacagtttgagatctggcctcccagggaggctgaggagtggcgggcttcctccagagatggcaggctgggtatcggaacagcacctggaaggagaagcatgacacctggtggagagcaaggacccgacagccaggacccaacccggacatgccacagggagctcggagcagcctcagggaccccgtctacccagtgggggtgtggcaggaagcagtgacagcccatggaatttgacaagtccatgagcacatgtgagcttccctcctaaacctgccagaaattctggagggaattttacagagccaacatccgacaagaataggtgggggaagaagccatggaatcatggaataggggctgctctttatgacaatgatcccaacagttggcgagatggatggaagtgtaacttagtgctgttgtgttgttaactggcatggtctttggggtcagacacaccctctgatcccactgtgctacatgtgagttgtgtcactgtcataggtaaatttcaatctcccttgaactccattttctccatctgttgaatgataagctgctatctcttggggctgttctgaaaatcaaatgagaccgaatttcaaggacttagaacagatcaggtgctcaataagtggcatccagggttttcttgagtagtttggtggaactgttccagctcagagtagtaacaatagacaaagacacaaactgtaggtcagcatgaaggggatgtgctagctgctcaggaggggtcaaagggtgactcccagtcgggctttggaggcttaaagagttcagccttagttgaactttaggagttcctctaaagcagatgaggcggggggaaggttgctacaggcaggggaaggcatgaaggccaagtaacagcagcgtggaacttcagagagctcccggctctccgatgtaggagacagaggggtgagcggtgggcttctaaccagagtggaacagagaagacaggacaggcctctggatgcatgtggggagaactggggggtgctggtcttaggcatataaatagtttcccttttcaataaagcagctccctaaatgtacagcccagatatcaactcaaaccccaagtcccgcagcttccccaggatttctgtccatccctgacatctgtgatttcctggtgactgccactctaagctcctctcctgagcacttggcttcactcatcctttcttctcattcatcattattattcagccagtatgtattgaggctgtgggagttgatcataaaaattggatcattcttgtcacatctgacttaaacagactcaagaggcctaggggaatgcactcagggcacaaaacattgctccaaaaatgtaattgtctgcaagcctggctgcggaaactgcctataacctatatctcatggctactaaaacaccctgacatgactctaagactagttttacccactgccatcactcaccaagcagagcctgccagctccccaaaactttactcttgtcaaagaacattctagaaaaaaaatctaacattttacctttttataaagcctcctacctcctctttgtctttggacatcatactgaagactaccccatctacatgtatgccttgcattgcaattctcacatcccaaataaaatgttacatttaagacatccatctctacagttttattctacctttaacagtgcctgctatgtgtcaggcacggttctaacaaaaaaaagtgccctgatggagggaggtgacattctagttgggggtggagggtggggtaaggagagacagacagcaaataaacagaaagcaaaatatattgaatgtcagataatgatcagtgtcatgaagaaaaaaataatgcactagtgaggattaacaagcaaaagatgcagctaaaaacactctcttcctccctccccacccacctcatcttcctctgtcccgttaccatgcaaagcctgcattcttggttcacctttgctgcactggtcttctttgggtaatggaaccctgcgtgtacatcctccatccctagaggagtgctgaactcagctactcaggggagcatgcttatctggcatccatttccaaaaaacactttctctataaataacatgggcaattaaattgtttagagcaccaagggtttgcagagaacaaacatcatgttgttcacatttgagctggaaggattactaaatgattcctgtttttcactctgattgttaaaaccttgataagtcagcttatttttattaacagaatcactgggttcctcctgatacgtgatgttcaactgaattaactgagattggaggcaaagattggatgcaaggagtaactgggctcacaacaagtttctattaacaggctaattaaagcaggttttgatggttttaggaaatgtggcctcatctgggcgtgcaaacaagggctctgggtctggaagaactaataatagctgtttggcaacactttgcagcagagccttgacacactaggttgctggtagcttgcattgttcatccctcaggaaaatatttttgttttgaaacttactaaactgtttttggtctgtggggtgatgttaatagaaacaggttcttttcctccctcttaatcttttaaagtttgccaaaataatggaaaatcctgggataccaaacaacaaaacattatcactaccctcctgccaatggttataaaaagaccatcccctaagttctgttctcctgattggaatgcttgtctggaataaggttatgacctgaatatgccttcaacaggccgactcataatcaggccttatataaattcttagggatgttaagaaaaagtatttaaaatatggaaataaggccccaaagtgggtggcgcaatgttttattacaatactggggccatatttactaaggccacataaggattatttaattatctagggaaatgcacctgtgtttgacctgccagttactattatttgaggctatacactgagatcacatgatattttagagaacttgtctaggagaaatgcatatcatttctgtcctgtaggaaaataatgctaaagattacagttttattgccctgcaggacattaaccaaccagtgttacctgtaagtcagcaaacacttcaagaagtcttttctggtagactaaaacctgttctatttctttctgaatcaactttatcatcttatttcttcactgatgagctgagtgaaatatctgacttgggttcattctatatttgtatgagtcttttttaacttgttgaaaactgtacattgacaggaatgacaaataacaaaagtggtggcatatgacaggcagcagcaatgttcaactttacctaagcctgagaccttggaaaacacggacacgtaagaaaacccccaccctcctgttcctggaaatggcttactgccgaagcctacccttccccatgtggctcggataagacgcatggatgactcctcgtttacccgtaacacacagtcacagactcaccaccatttccattctttgcctcataaatgattagctgaattgcctgccacagtgaccaatctggacaagatatcttctcatttgaattaaccaaactttggttaagtttctctccttcccccagacgcaccctcagcctaagccagcatcagaatgtggacggcccctccttgatgttccctcccgacatgaagagaactggctgtcagtttcctcatcaattgtccttctagaccacctgcgggtcccacttccccacaccaattctttccagccttgctttactcttccctttcaaagaaaactcttttctccctgcctgatttgggagacacttgcagatcctgtcgtctgtgcctttcccatattgaaatggtctttcggcgcagcagtgatcttttccagtaaagtctctatagctaagtcctgatttgttcttatttgaccctattctgacactgcaaagagaaaggacccaacccagtgctttcacggcaacctgcttttcctctcctccctgcccctcctaggaatccagacccgggactacttgatactcaagctactagccatgtgcctgataagtgtcctaagtggttttctatagagtctttttccccaaaatgtggttcagggagcaaaacatcaaggacacacgtcagttagttagaattcagaatctcacgctccaccccagactcccagaatcagaatctgcattttaacaagacctcagggcgaagcatgtgtacatgcaggcgtgagaagcactgctgcagggcacactggcacaggccgccctaaatccttgctctcccggggctctgtatccaagagcagtttgtctcaaatggaaggcctttccagcacagctggtgcctgccaggtgctgttctctgggctcctgggtgcttacagaggcagagctaagtctgaatacaaacatcgcataaacctccttttatatgctaataaacctcctagattaaacagcaagccttttgcaggcacaattctcattttctttttatgaaagatggtcactaggtcattcttagacaactttacttattctctgcaacttccttgcctccttgcaggagaaacttggatttccaaagcattcaaaatgcatggcccagctgctcctcatattgaagttgcgaccatgggatttggcaacattgagctccggctctgggcattgctctcacagctgagagtgacgcccaggctctggcagcccagacttgtcatcctgtaaatgaacaatccccagtccccgggcctcattttattcacttggctgagctgcctgtttgctttccgttctgtgctcgccagctcactaagcaagaggatccgtgcctgactgcgtggagaagctgtagaggaaatggccaccctgactgtcccagcacctcccggggtggcccggggcctgggccctgagcagaactgtgataaagggaagcagggaagcagtgcgagagccctgaccaggtgcaggagcctgattccgaatccacctctgccatgggcagattgcatgatgccatcagagccctctaacctctggccttcagttgtcacacctgtaaaatggggaaatattctaaagaagtggctcaaaacctgatcatccatcagcctccccccaagaacatggggacagtgcacatggcaaggccccatgcccagagtttctgattccacagtttgggatgaagcctaagaatgcgcatttccaacaaggcttctggtgaggctgatggcccagggacctcactttgggaagctctgtagtaaatccagtttctcagccagtctgctctgtagagctcctgagacagactctttccctaggcctcccctgaggttcttacttaagcaagtctccatttttcaaaagctctgccaggtaactctatatggcactagggctgagaggcactgggtggatgtttctaagatcccacgtagctctcacatgccaggatgccatgattttgaagcagagtgcctcctgccttgccaaggctgacagcacacacagggcaaaaggccatcgtcacatattggaatttcactctttgaaaacctggtaatcgtgtgtcccatttcagctcgagcagaggttctccagaatgagatcctgcccagaagcacccatatccccttggaacttggcagaaatgcaagctctcaaccccattccaggtcccctgaaccagaaactctgggttgagaatgcaagtatctatgtcctaaacacacttgtgatgcttctaattcagctagtgttggagaaccactgacttaaaggaagagctgtttttctctgtcccaaatgctctgctaggaacactcagtgtgaactctgatccccaatgacagctgccctggactcccttcctcagacagtgtgaaagcctgaaacgtgtttaattaatcaccttagaacccagcaggaaaaaggcttccaaaacccactgtcctcagaattgcccctgtagggaccaaaggactccaactcgtctgacctgaagccccattgcatggatgaagaggaggctgctaggtgggggccgctgaggactgagaggccttgggcagtttcttgtctccctggtgcattaagccaaagctatccacaggggtcagaagttgttgcctggagaaggtttcaccatcagttcgatgttatctattaacaaaaacaaaaacaaccctacccatggccgagagttctaacaggtggctccccatgtccaggccacatactagatccatgcgagcaggggcatgtgtacttcgtaaggctccccaggggtctccaggatgaggccaaggtggggacaaggactcctgtgccccaccagcagccctgggttaaaattctcactatatgaccttggaagttgacctgatctcactaagcctcaatgtccttttctgtccccacccccaccaccagcatggggacaggtgtcctgctgttctacttagcatcaagtgtccggctctgaatgatgctggacacattgtaggtgttcaatttgttgactaactaggtggtttgaggcaacaatcatatgtaccccatgggtatttgagagaactaaatgagaaaaggcaggaaaattgcatagcatgctgcctggcaaactggtggtgcttatttatgtttgctattgttattagtctgcatttttatatgtaagattttctcatgttgattctcatatagaggaggtcaatgatacactaagcttatatccccttgataaaattctgaaaatctcattcaaagaaaaatgcatccagatttatgcttccacaaaaaataacaggaaacagctttcagccaggcagtgacccagtggaagaggcagaaggaatggaccccttgacctacatgccttggccctggcaagggaaaccctgactgtggccctcaggtccagctctcatgcccactgccctgcactgcacacgctggctgaaatgtgtctgagtcttatccacacatggaaacagttcccctggggtcactggctatcttccagggcttagggcttccaagggttactatgccagtgggatttttccacaaaaaagggaattccaacctgatggatagttttagaaaatctgccacagtgtcttggtgtcacctgctcattcacaatgatgcagctgatggatgcatttctacaatgacacatccctaccctctgtatgaccctaggttcctgtcatgccatgaagtgcatgactatctctcctgggagggtctacccccaagggacaaacatgaagaggaagttgaccacagcagacctccttaaaggtagatttttccagggcccagtgcccccagagctatagagtattgctgatcttcacttgggttggacagtgattttttaaaatatctggataaataagtttcttatttggccccaggaagttggttactctaagtatatgcaagggttgagttaaaatggggtgggggccaaggaaggggacaaaaggacctgctcatctcatctctattcagaagtggctctcccagtcctccaccaggctcaactcaacttgtaggaagaaaacaggtttctggcaccagaaggatctgcattctattgtcaccgctaccataatgacgtagctgtgtgacattggacaagttaatgagctgccctaaccatagtgttctcacctatgggagaaccataatggttcataattcatagaatatgtacagactgagtgttcatgtcacagtgaaattcacatgctgaaacttaatctccaatgtgatggcatcaggaggtggaacttttgggaggtgattaagtcatgaaggcagagccctcatatacggaattagtgtccttataaaagagaactcagggagctctcattctctttttccgcaatgtgaggggatagcaagaagacagccatctgcaaactaggaagcagacctcaccagtgattctgccagtgctttgatcttgaactccctagcctcccaaactatgagaaaaaaaaaaatcttgtttaagccacccagtctatggtagattgttacagaatcctaaactatgacaggaattagtatcaagaagtgggaatggtgctgtaaaaaacaccgaaaatatagaagcaggtttggaagtgggtagcagagtctggaagagctttgaggtacacgctagaagccaaggtttaaggaagtgaagggtgttttaaaggagattctggtaatagttcagaaagaaaagaagagagctgcaggaaaagcttcaatctccttagaaaacacctgaataattctgaacagaatgttgatataaatatgggtgataaaggccattctgatgaagtctctgccagaaatggggagcatgtttttggaaactagaggaaaggcattcttgttacaaagtggcaaagaacttggctaaaccatgttcatgttatagtgttttgcggaaggtagaatttgtgaatgatgaaattggatatttaggggaggacatttctaaacaaagtgttgaaggagtggcttggttcctcctaacagcttatggcaaatgcaagaaggaagaaataacttgaagacagaattataagcaaaaaaggaattagaacttaaagttttggaaaatgctcagccttttcatatggaaaaaaaatgagaaagtatatttggaagagaccactaagtctgtggccaaatgacactttgataaagagattagcacggctgtgaaccacaaagttaatcaggtaacccagcaggaaaactgcatgtgagcaagaatatgggaaggagtgagggaagattacctgacttcctgaattttatagaacaggaccggagagctatttaaaagtgctctgttcttcaagacaagggaagaatggccctaaagaagattcagagaatcactggggctgcattttcagtttcaagcaggggggtgagcttgatccctgctagtaggggtctagaaggcaaagtaccaagctagagagatcattctctagccttaagatctcatgagatttgcaatgctaggttttggacttttttggagcctgtcacccttttcttcttttttttattttctccttttgaagtgggaatgtctatcctatacttttcccatcattataacttgctgagtttgacagattcacaactggagagaaattttgcctcaaaataaaccataccttgtgtctcacccatatctgatttagatgatatttagatgagacttcagagtggatgctggaatgagtgaagattttgggggctgctgggatggaatgaatgtattttgtatgcaagaatataaattgggcaggggggccagggctggaatgttatggactgaatgtttgtgtctctccaaattcatgtgttgaaatactgaccctcaatgtgatggattaggaatgtagactttgggaagtaattagttcacgagggtagagctcttgagaatgggattactgcttttccaaaagagaccccagagaactctcctgtcctttcatcatggtgaggacacagcaagaggaagcctatctgggggctaggaggtggatcctccccagacactgaaagagccagcaccttgatcttagacttccaagttccagaactgtgagaaataaatatctgttgtttaagccacaccgtcaatgataatttgttatagcagcccaagctgactaagacagcatgttagtgaggtttgaatgatgcatgtgtctgattaatagaagcaattacaagtattaataaagattaatagaaacaattacaagtattaataaggtgccgagctgggagagggaaggggaatgcagggccactacctcagagctttgaaggagcaggagttcttggcaacagagacaatgacaagccaggaaggaggacatacctgaatcagtacaagggaatctatccctactgcccctgcctagaccactgcagacctctcctccaccctcagggctacttcattcacttctcagtggtctttctgcttcctgtcttccctcttacagtctatgcctctatctctccattatccagaatgagcacaagttaaataatactgttttatgagcacaagttaaataatactattccttccacttaaaaccctccaatgcattcttcttcttggattagactcttctccatggcctccaaagctgcagatgtgatctgacccatgccgccctcccctccttcctctcctccactcccttccgtgtcattcaactcactgagcttgttctggccctggtccttgcactggctctcagaaaatgactctcaatattttcacacagtgcactccttgcctctccaagagcctcctctttagaaaaggcctagaaaggagagggagcctgagcatatggcccacgctccctctctttcctccacatcatctccctctgtgccagcactacacgtgcactcaagcctcatggaggctgcgattggacaggagtgttccctccctgaggcaaagtgggatctggggcaagagcctggggcaggcaagggggtctctgatgtacccccacaccaggacttcacatctgagcacccaacactgactctccttgactccggctgagactcaaagcacttagcctttcctgggacccagccctgtgctcagagttataaagtgattgaagctcaggtgtcagcaggtgggtcattggtggttgattatcccttccagacaacattggagtttcctgagggtcttgaagattctggttcaaaagtgtatcttagagtgtgtagttcaggaattttcccattctctgatgttgggaatcttgtacagagggtttcagtgattcttatcatagtttcacaaatgatccttactctatggctatcagagatcacaaaactgaccagagacaaatccacagcttaagacccagctctgagctcacagcctgggtccaggctctctctttgccctgctacttgccctaaaagttgcttaagactctctctccccttcaatcatgtgacctgtaagagccagacactgatgcctggtgcttttaattacagagtgaggaaataacaagctttgctacaaagattgctaagttgataggagataatgatcattgccattgacatctcacaagaagttcagacatcaaagcagcacccaccctaggaactgggttttcatcttatccttcctctttgtgtctttatttacttattggcctaggacattccacaaggactggaataatgacatttgtgctgagaggatgatatcagtttgaaattcgtgctgtcaggataaatagaaaacccttcactatttgattatctagcaagaaattaatggctatccataaaatgtctaataaaatgatctgtttattctagaagctgtaggaactctgtttgctttcctcacccttacgcttgttcttctcagtgcaatatgactaattggtttaacacagacatcaaattaccagcctggctccttccacaccaggagagccctgcagaaccaaagcagtgcacacgcccctggggaacaaatgcctggggcaggatgctggggagccgaattgtttgctatgtgttgcattgatagttttattccagttagtgacctgcagtccatcacaggctgctttgaaaacccaagatagggcgcatggtaagggctttctgttagggtggagacaccacccaccatctttttgttcctaagaactgtgatcagacccagagtacaatcacggtagtaacatgagccagtttatggagggaacagaaatgggatccaagagcttccagctgacttcagagcccaaagcccttcccgtacacccacttcataccttcattcctttcctggctccagtggagttttttaaatgcccaactttgaaaagttctttttaattgagtatgtatatgttctgaattatagtcagaaattttcagtcaatatatataagatatcatatatgtatatattatacatatatgtgtacatatattgtgtatatatacgatttcaacatgtaaattattgagaggttttacattcttatattgtatgttaaggcttcaagatccagtgtgtatcacacacagcatgtctcaatacttactggctacgatccaagtgtttaatagccatctatggctagtggctactatactgaccagcacagttatagataatagaaaagtaaacaacattttcaatattaaaaaggtttgaaataaaaactatagttatcaaagcttatagcaaatttgagatcaatcacttatgaacgtagatgcaaaaaaaaaactaaacaaaatattggcaaactgaattcagtcaatatgcataaaaacataaaagaccatgtcaaaattattatattccaggaattcatggatggtttaacattagaaaaatacatatacacacatatatatgtactaaagactatgaaggaagaaaagaacagtaattattaatgattttatctcagaatggtgtgatatagggtaatttttactttattttttgtattgcttattttttacatactataaaacaattttcacaataggggaataaaagggcaatcacaaaattcaaaattaaaaacaagaataaaaataatagaaatagagaaaaaataattttgagagaatattttgtttaactgaatgcaaataaaataaaatggatgttattctagaaatatatacagtatttttatttttatttttctttatctagaaaatacaaccctgacctcagaggaaataaaacatctaaacagagaagttacgtgaaacaactgggaatgttactaaaggtctgaaccctcaccactaaagtccagatgattcctgtgaaatctgataaaaccttcagttcaagtaacaggtaattccaatgccattttaagtattctaggtcagtaaaacagacaaagcttcatatttatttttattcagcaaataagatactctattccaagaaagcatacacaaaacaataaacttatcttctttataattattggtagaaacatcataagtaaaatagtagcaaatacaaaccaggaatacattcaagaagcaatagcccatcaaggagggtctatcctggagatgcaagcacggccatactaggaaatcaatcccaattcacatgactttctctgaaggcatcttataaaccccacaggaaaaatgttctgagcactcgtgataagcagaatagtgacctccccaaaaaggactacaccttaatccccagaacctgtaaatatgttagtttacatgaaagtggggaatttaggtggcagagggaactaagttggctaaacaactgaccataacataggcagatgtatctgttatccaggtggggctgcagatggcaggaggggaccactggatggcccaactgaagcggcctctgggcactgggggaggcaaggaggcagtgtctcccggagccccagcaaggaacacagtcctcccagcacctcgacttcagcccagtgattcttaggccagacttccgaaccacagaattggaagatcatatatttctgtttttttaagccactatattagtggtaatttgtaacagcagcaatggaaaaccatcacagtacttaaacagcccctttaaatctaataaaccaaagttagaactgtagagaatcaatgttctcttaggcattacaatgctgatttataaacttcataacattgctatatacttatcaacttaaactcacaagtctaaaaccaatttcacatttcaaatttaaaccacattacatgtcaagtatgccacaagtatttcaactcaagactttaaaaaaacaaacacatgagttatcccagcacttatgaacattttttaagtttagcttgagtgtgcttgtgatgtgttggatgcacccgtgagtccatctgagaggcctggactgcgtggatccctccagtgcacaggactacacccccactcactggctcggcctgcattctgtgttctcatctacactgaaagctcttaaagggcaggatttctgaatttctccctcccatcccttcctaccctgcacggcacctgaaagcagttcgggcttcatgactgtttgcaggttgatcagtcatttataggatgatcagttatctccattactagtgtagttatttacaattactagatcgttctctaattgctagtatagtaattactgaactacataaaatatactatattactatactatgtaaaattctagtatgcccaggctctgccctcacctgtttctggggaagagggccctgccccagctccaggcctggttctcctaagcccaggccctccttgaggatcccacctcctcttgccactgattgactcatgagtccgggctttggccaatcagtgcttggctttcccccatgctattgatgtaagtagccatgacataaactggcccaatccagctggaaggagagcctgttattccatgactgggagaaaaagcctctctcctaggggctatgaaaaaggaaacattgtatcccatttatggctggtggtcgaaggggagctggtctgagggcgaaaccagcagaggaggaagagataacaaagaacagaaatttgagggcaaaccccaaccacaggtactggggccacctgagccctggactcctctggagtgaggccacagcctgcaagaagaaaaggtcaagatagttattttctatttgaaaacagaggtttaaagagcatatatgactccatgaaagaccctttcttcgtgacatcaaagaggcgtccacccaggtctaggacaggggtctcagaacccagcctcctcctgggctctcctcacaacacactgctccaaaagtttggttggagggggatgctggtatattttaaatcgtgtcctcttaaatagccagcaccctgacacagtgggagggaatgacaggatctttttactagagaaaatttcaaatacagttggccctttgtgcaggggttgggggtaattaattccaggacccccaaggataccaaaattctcggaagctcaggtccctgatataaattgacatcatatttgcacataacctatgcacatcttctcgtacactttaaataatctctcggttactccttttttttggcataactgttcatgtattcctttaccctagatacactgttcttacctttttgctcctattgtttaataaaaaatgaagtcagtaagttcagaggacacaaatagatagcacatgatcatgtctctacaaatatagttactcccttgctcaaagtgtggtccacaaactggcagcatcagcatcagcatcagcagggagctacagaaaggcagaagctcaggtcccacctgaaaatatggaatccaagtttgcactttaatgagcacccaggggatccatctgtgcatgagcatttgagaagcatgatccaggaccgagtccttgcccttccttccatgttcaaatgcatcatcacctaaatcatacaccaaagtttcaccattacaatgtgccataggatggacaacaattcaaaacaaattttttcacctgcttttctgatttttgaaagataacccttgtccattcacctattggaatgaaggaaattgtagtagtatgattgatcacctatgggaagttgggaagagcaatgggatcagtgcatggacttaccaactgtaagaacttttaacacatgacttaacttctctaactctcaatttcttaatctgaaacctacctcagaatattattgcgaaaaccaaatgaagaaatgtatgtgaaagtgattttataattagttttggggtttactacattatcatggttttcttaaattttttaattatttcaatatttttgggggaacaggtggtgtttggttacatggacaagttctttagtgatgatttctgagatcttggtgcacccatcacctaagcagtgtacactgtacatattgtgtagtcttttatctctcactcccctcctacacttcctctcaagtccccagagtcattcttgtgcctttgcgtccttatcgcttagttctcacttatgagtgagaacagaggatgtttggttttccattcctgagttactttacttagaataatggtctccaactccatccaggttgatattaatgccattattttgttcctttttatggcttagtagtattccatggtgtgtgtgtatatatagatataggtatagataaagatatagatatatagatatagatatatagatatagatatagatatagatatagatatagatatagatatagatatatcccacattttctttatccacttgttggttgatgggcattcaggttggctccatatttttgcaattgcaaattgtgctgctataaacatgcatgtgcaagtatcttttacatataatgacttattttcctcagggtagatacccagtagtggaattactagatcgaatggtacttccactcttagttctttaaggattctccatactgttttccatagcggtcgtaccgatttacattcccaccagcagttcccttttcaccacatccacaccaacatctattattttttgattttttgattatggccattcttgcaggagtaaggtggtatcacattgtaattttgatttgcatttccatgataaaagtgatgtttagcattatttcacatgtttgttgccatttgtataacttcttttgagagtagtctattctgttcttagcccactttttggtgggattatttgttttcttcttgctgaattttttaagttctttgtagattccagatattagtcctttgttggatgcgtagtttgggaatattttctcccactctgtggattgtctatttactctgctgattatttattttgctgtgtagaagttttttagtttaattaatttccatctatttctctttgtttttgttgcatttgcttttgggttcctggtctttgcctaagccaatagatgaatttttctgatgttatcttctagaatttttatggtttcaggacttagttttaagtttttgatccatcttgatttgatttttgtgtaagatgagagataagaatccagtttcattcttctacatgtggcttgctaattatcccacaaacatttgttgaatagggtgtcctttccccacttgatgtttttgtttgctttgtcaaagatcagttgactgtaagtactgggctttatttctgggttctctattctgttctattggtctacatgcttgttttcataccagtaccatgctgctttgataactatagccttgtagtatagtctgaagtcaagtaatgtgatacctccagatttgttctttttgcttagtcttgctttggctatgtgggctcttttttgtttccatatgaatattaggatttttttctagttctgtgaagaattatgatagtattttgatgggaattgcattaaatttatacattgcttttggcagtatggtcattttcacaatgttgattctacctgtccatgagcatgggatgtgtttccatttgtttgtgtcatcaatgatttctttcagtggcgttttgtagttcccttgtagagatcgtttacctctttgattagatattttcctaactattttattttttgcagcattgtaaaatgggttgtgttcttgatttgattctcagcttggtcactgttggtgtatagcagtgctactaatttgtgtaccttgattttgtatcctgaaactttactgactttatttatcagatctagcagctttttggatgagtctttagggttttctaggtaaacaatcatgtcatcagcaaacagtgatgggaattgcattgaatttatagattgacagtttgacttcctctttgtccatttgaatgccctttatttctttctcttgtctgattactctggctagaacttccagtgctatgttgaatacaagtggtaaaagtgggcatccttgtcttgttccagttctcaggggaatgctttcaactttttcccattcagtttaatgttggctgtgggtttgtcacagatggctgttataactttaaggtatgtcgtttctatgccgattttgctgagggctttaaccataaaggaatgctgaattttgtcaaatgctttttctgcatctattgagatgatcatgtggtttttaattgtgtttatgtggtgcattacattgattgacttgtgtatgtgaagccagtcctgcatccctggtatgaaacccacttgatcatactgtattatctttttgatatactgttggatttgtttcactagtagtttgttgaggattttcgcatctatgttaatcagggatattggtctgtagttttcttttttttaaaattatgtcttttcctggttttggtattagggtaattctggcttcatataataatttaggaagcattccctctttctctatcttttggaatagtttcagtaggattgataccaactcttctttgaatgtctgatagaattcagctatgaattcatctggtcctgggctttttttgttggcaatgtttttattactgtttcaatttcactacttgttattgatctgttcagaatttctatttcttactgttttaatctagatgggttgtatatttccaagaacttatccatctcctctaggttttctagtttgtgcgcataaaggtgttcatagtagccttgaattatcttttgtatttctgtggtatcagttgtaatagctcccattttgtttctaattgagattatttggatcttctctcttttcttggttaatcttgctaatggtctatcaattttatcttttcaaagaaccagctttttgtttcacttatattttgtattttgtttgttccaattttatttagttttgctctgatctttgttatttattttcttctgctgggtttgggtttggtttattcttgtttctgtagttccttgaggtgtgagcttagattgtctatttgtgttctttcagaatttttgatgtaggcatttaatgctatgaactctcctttaagcaccaattttgctgtattactattttcattcagtttgaaaatttttttaatttccatcttgattttattgttgactcaaagatcattcaggagcatattatttagtttccatgtatttgtatagttttgagtgttccttttggagttaatttcgaattttatttcactttctctcaggtctgagagagtacttgatataattttgattttcttaaatttattgtgacttgttttgtggcctagcatatgatcttggagaatgtcccatgagctgatgaaaagaatgtatattctacagttgttgggtagaatgttttgtaaatatctgttaaatccatttgttctagggtatagtttaagttcattgtttctttgttgactttgtcttgatgacctgtctagtgctgtcagtggagtattgaagtcccccccacccacattgttgtgttgccatctatctcatttctaaggtctactagtaaatgttttataaatttgagagctccagtgttaggtgcatatatatttaggattgtgatattttcctgttggactaatcgttgtgtcattacataatatccctctttgtcttttttcattgttgttgctttaaagtatgttttgtctatataagaatagctactcctgctcacttttgctttccatttgtatagaataccttttttcacccctttaagtttatgtgagtccttatgtgttaggtgagtctcttaaagacagcagatatttggttggtggatttttatccattctgcatcttttaagtggaaatttaggccatttacattcaacattagcattgagatgtaaggtactgttctattcatcatattagttgtcatcagaataccttgggtttttttttcattgtgttattgtttaataggctctgtgagatttatgctttaaagaggttctattttggtatattttgagggtttttttcaagatttagaactccttttagaagttcttacaatgctaacttagtagtggtaaattctctcagcatttgtctgcaaaagactttctccttcatttatgaaggttggtttgctggatacagaattcttggctgataatcattttgtttaaggaggctaaagataggataccaatcctttctggcttgtagggtttctgctgagaaatctgttgttaatctgataggttttcttttatagctgacctgatgcttttgcctcacagctcttaagattctttccttcatcttgactttcaataacttgatgactatgtgcctaggtaatgaactttttgcgataaaatttcctggatgttcttgtagcttcttctatttggatgtctagatttctagcaagactggggaaatttttcttgatctttccctcaaataagttttccaaacttttagatttctcttcttcctcaggaataccacttattcttatgtttggttgtttaacataatcccaaatttcctggaggctctgttcatttttttaaactcttttttatttgtctttgttggattgggttaattcaaaagccatctttttggattctgaagttctttcttctactcgtttgattctattgttgaaattttctagtgtattttgcatttctctaagtatgtctttcatttccagaagttgtggttctcttttctttatggtatctgtttatctggaaactttttcatccatatactgtattttaaaatttttctttgagttggttttcttctttctctggtatctctttgagtagcttaataatcaatcttctgaattttttatctggcaatttagagatttattcttggtttggatccattactagagagctagtgtgatcttctgagagtgttatagaaccctgttttatcatattatcagaattacttttctggttccttctcatttgggtagactgtttcagtgggaagatctggaacccaagggctgcagttcagattcttttgtcccatggggtgatcccttgatatggtactcttccccttcccctaagcatagggcttcctgagagccagaatgcagtgattgttgttgcccttctgggtgtagcctctcaaggactacggggctccaggttggtgctgggaaaatgtctgcaaagagtcctgtgatgtgatccatcttcaggtctcccagctgtggacagcagcacctgtttcagtggaggtggcaagggagtgaagtgggctctgtgagagtccttggttgtaattttctttagtgtcctggctttcttcaatgctggtaatactagcagtgaagttgtcacgtggacagactcaatatctctgtttagccagggtgttgtaggcagtggaattagctgttgttttctccttctttggagcagggttgttctgctataagttgctgtaaagacctgagttggttggcatccagccaggaggtggtgctttcatgagagcatcactatggtagtatagagaggatataagcttgtcctacattggccagtattttgtaagtactcggatttcttaggcaatgggtggggccgtagagctcccaagagtttatgtcttttgtcttcggctaccagggccagtagagaaaaaccatcagcatcatggtccatatggccctgcccctacttggccacaagggactgagcacagggtggatagctggtcctcaaccagcaaggacctctggcttctgtggccaagctcaaagtgtgagtcagtcatcagacaccccatcccctggggacccagactgcaaaagcaggagtctgggcccacaaggggcaggagagaagtaagagtcaccagatggaccatgggagaccctgagaagcttgtgaatatacaggctggtgagaggggacaggagcagatgctgctctgagcgactgtggggagaagaagaatctcttcccctccaccctctgtggcttctaggtttgtccaggctctgtgagtgccctcaccatggctctcttttccaggaagaaagtggagcacatctgtctgagtttgtttcaagttgctgtaacagaaggcctcagactgggtaatttataaagagaagaggtgtattttggttcatggttctggaggctgggaagtcaaagattgggtggctgcatctgtgggcctagagctgcatcagaacatggcagagatgtgaaaaaggaagcaggtgtgtgcatgtgccaaggagaccccacagaattccagtccagagagcagcactcgctcctgtgagaaaggccataactcctcttaacaagctaatcacttattaaaagccccacctcccaacactgtcacactgggaaccaagcaccagcatgagttttggtggggacaagccatattcaaaccatagcaacatctttgtatggttatgtcacaatgtttaaacagagttttgacattattcattatatgtaagcatgtttctctcacctcctctctttccatccatcttcatagacccagggaaagggaagaaagagaagaatggataccacattggaaaagaaaaatgtgtcacctagaaggctcccaggggtcaccaagagggaaaggtgttacccatcctgtccggccacagtgggaagacgaggctgaggtaggaaggaggagaggagcttcctgcccatagcctctctctccaggccaaagtccaggctgaggggacaccaagagcagaagggcattggctttgctcctttcttggactccttggaatagcatagcacacatcctccagcccaggctgcaacagtgaatgccagacctgcccatggccaggagaggcacctgaccaaaaggacccagaggacagcagcaagcaaacaccaaggcaagcctgaggccagagccacaaggtcaaatgaacccagttatggactgaattgtgccccctggatccgtgtgttgaagcaccaactcccaatgtgactgtatgcagagatggggccttgaaagaggtcagaagggtggggccctaattcaataggtcttgtgtctctgtaagaggagattaggacacagacacatatatgtgaagacacagggagaagatagccatctgcaagccaaagagagaggcctcaagataaaccaaccttgccaacaccctaatcttggacttcagcttccagacctgtgagaaataaatttctgtttaagccacctgttctcaggtacagttatcatttggtacatagaaaggattgcttccaggacctcctgtggataccaaaatccatggatgctcaagtcccttgtataaaatggtgagtacagtatttgcgtataacctacacacatcctgccatatactttaaatcatctctaggttacttaccatacctaatacattgtaaatgcccttaaatagttatcttgtataatttaggcaagaatgacaagaaaaaatctgtacatattcagtacagatgcaacctacctttttgaaaatatatatatttttgatctgcagttggttgaatccatggatacagaacccatggacctggaacccatggctgccaggggccgactggattttgttttgcagcctgagcagaccaatgcaacccctacagccccgccatcctggagaggtctggaaggggttctgagaagggctgagccatccgaagcagctgtgtcaatctcaagaccacagacagagctgcctgggactgggctttcaggatgcgatggcagcaatgcattttccctgctgtcctgcagggtagagcttgaaagacagctcacaaaataaaacagattttctgtcatgcctaaagccaagatgccttccaaccaaatcatatatgttataggcttacttaggccacctcagagtccctttttagaacacggaggaatacaaggagggaggggggccaagggaggccgaggaggaaggaataggttggctagggaacactgccattccctatccaaccacaaaggaatggaagtccagtaattttgaggtgaaacagaaaagcagaatgcctgtttgggcattagggtgtcccttgtgtctcctctcccatcggagcaaatctccagtatattctgaaccccagatagaaatcagaactcattccatttcatagcaaagatcctgcacccccaacctccgtgccagcctatgagtaactcagtgtattctggtctctggtctctcaagatgttgaaatgagcagcttgcccaatcgcatcccaatgggctaagaaacctcagagttctccttcgagactgatttcctgattgcacaatctctgagccagcaggcctcctatccatgataagacaatggcccagccccagtagatagcagattggtttctaggtccaggctgagcaatctcaaataagggcatggcagccaagggtggcttggacttgatgaggaaggtcattcatcctgattctgcagctgctaaggcaccacaatcaaccgttttttttgttttgttttgttttaatctgcttagtgcttaccaaactgtgtcttttctcctcccaggccggaggttcccaggagcagaccaagagagtcaatgtcatgcagcaaaagtctgcagcacctcactgcccagggctctgtgctggggtgtggggtacaaagcaggctgtgctgtgaccccagactcaagaagctcacacgtgggaggccactgggaagccagagaagagtcctctctcctggacagactcctttgtcctcagtttccttgttgtaaaatggtggtcataacagatagtagaaaaacagtaactcctagggttttgtgcaaattaaataatacatggaaagtccaatagctaataatttactgtatacctcacataggtttactggatgttgttggattagctgttaattgaaaaagttacatattcttcaaagaaagaatgaagggaggaagggaggaggctgtgctttagaagtgtatcagtaaaattggggctgctaaacagccagagtatgagaaggcatatttggcgaacacgcctaattgttcaaggttgaccatgcagaatgcaagtcaattcctggggctggggatgggcccccccaaccctggaacacaaagtcctgcccctgggaatctggaatgggatcacagcattgggagttgagggccaagtcctgtcaatgatggctgcagagaagagaagtccccaaacctgtccaatccaactcttccttgaattcctcgagaagccccaacatcttttcgataatttcccttcttcattccaactgcctcaagtcagtttattttgcccatagaaagaagaaactgaactgatgcagatccttaaggtctggtatgtttaagtgctccctttctttggcactagctaatgtgcagcagcaactatgatggtggtaggtaagccaggcactgaggccagacttccagctggagctccctcctctgggcatccctttctttaccgtgaaaatcagaaggtggccctcttctcccccaaccccagcttagcaggcctggattctagggctgacaccaagttttgccagcaacaaacataaatcctgtgggggaaggaggacagaggtagagaatgttttttcaacaatgggcaccccatgaatgcaagcctcagaaattgcatttagatgatataattaaatgcttaaaaaaaaagacaagaatgagatccagtcatctttccagatatttttccactcaataaaagttcaggatgtacttttctaagctcctttcctctaaaatgtgtgtattttgaaggaaatgtagcccatatgttgcttactcatgcttcacgctaagtgctcttggggcatatttactcaaagtccaaaacaacctccatttgtttatgtttttaaagaatctctcagagcttaaaaacaggaaggcttagttggccaagtgcactccttgcaagttttccacgggttgagggttcagcatccatgatgagatagaaagggcttctcaagttcataaaggtgcattgaccacctgagcctggttgatgaactgtgagtttattcagcccgaggccaggtccgtgagaggagcagcctgtgcctaggagggtaaggatgggccagaaccctgctgagagtcagcgctggcccaaagccctgatgagggcattgccctgcaatccccaagtctacttcccagccctgagtggaggacatctggggggtagttctagcaagcccagggcaatggttcactgcagtaaagactgagagaattctatcttggctggatgacctctcccctaccaaatggaagtgtacaaggcagggaagaggcagcaagacagtggcattgggctagcagaaaagtatggcaagtagaggcagcctgtgctgtgccttctgcatctgcccttctctagcctgaagacctgaagctttccaggctcagtctcatcgtctgtaaaatgggaatcatgcatttaccttataaagatacaaggatcagaaatgcacatccaaaatacccagcataggacccggggatccataactgggaacccttagcagacaatatgggtgcaatggttaatattgagtgtcaacttgattggattgaaggatgcaaagtattgttcccgggtatgtctgtgagggtgtttccaaagcagatgaacatttgggtcagtggactgggagaggcagacccagccttaatctttttgggcaccatctaatcagctgccagtgcggctagaataaagcagacagaggaatgtggaaggacttgactggccgagtcttccggccttcacctttctcccacgctagatgcttcctgccctggaacatcagatttcttcagcttttggactcttggacttacagactaactaatacagtgactaatacagtggaagaatctggacggcacgatccttgttaatgcgaccatggtggtcacatctgctggtatggtctgaatggtttcattccccaaaatttatatgttgaagcctaatccccagtataatggtatttggaggtgggatctttgggaggtgattaggtcagagggtggagtccctgtgattgggattggtgccctaataaaagagaccccagagagatccctcactcccccaacaccatgtgaggacactgagaatatgtctgtatgaaccagaaagagagcccacagcagacaccaaatctgcaggtgtcttgattttggacatcccagcctctggaactgtgggaaataaatttattttgtgtataaatcacctagtctatggtattctgtttgagcagccagactaagacacctgccctgactcagtgtgccatggagttaggataccagcacaagaggggctcaggcagtggaactggaagctccctcctacaagcacttagcctggatcagcagtctccaaggcaggatgtgggaccccaggggagtgcatgacaatctagtggtatatgggaaggatacacagagcgatctctacatttatttcacctgcatgtaataaagaatgttttctaatactcagtgtaaggattaactctgcttggccaagcattgtagtgccaaaagtccatgagctacccagagggaagagtgggaatttcccagtggagaggcaggcgtgagatcctgtctgcacattgtgcagtttatatgcaccagggtgcgtagatttccttatggagaagaatcctcacaccactctgctggcaactccctgtgtagctgatgtactcagacaagtgatttcgaggtgggtggttttcttttacaaaaggcaggcacttctttggctgaactgtcctctgtgggtggacaagagctagtcatcaacatgcaacccagcagtgtttccaaaaataataaacatgctcaagctgtcttttcaagggagaggtgatgttgaacactagatgttaaggaaactgcttttcaaagaaacttaccctacagagagatagaaaaatgatgcatggaacttttccctccttatgtgattttgttaccaaaaataacatacgcatgtcatttatttttaaaaacttcatatctcatacattgaaaacacttgcaaatggaattttctaacctgtttaaaaatcttccaaagtgttttagtggattttgaagctatttgcctaaaaattataaaaatgcaaataccttgtaagaaaaactgagataaaaaaataagttttagccacatttcaacacaagcctttgcatgattggtgaatggagttgaaaacatgagtgctgtgatttaggcagctctgtgcactcgctggatccctgggaacctggtgtgttgagaggggtcctcccaaagcagcccaaactgagaaggttgaattgctgcctcagaaattataaaccaaagtttatgaaatcgatggagcatgtccgatagtgttagtaatccttctaataccactttagttcaaaaataaaaaagatcgtgtccataataagaaaatattttaaatattgtttatttcatctttgttttatttttatcttttttatgttaatgtatattttattttccagataatatactatgtcagtgtcataaagatagaatatgtgtgtgtccatagacatatataatgcattcatatattggggatgagtttttagatttttggggatctcagaggcccagatggttccaccgactggtggccctgaggagccacactgcaatgccagactctccgccgtccacagcccccacccacccagcagcccagtcatgcccacctctgccctccagcttccattccacctggcatctggcctgcctcttctcacttgctcctgctctgcccaaacacatatggaggatgcactttgacaaaaaggaccaatgtggaaaccacacccaagttagatcctcagacaacagccagagcagacaagtacctgtcactgagtgagagggaaaaagggatttccatggtcaaatcagggagtattcttgctctgggtgtctctggaggaagctgcctcctgctccctcttctcacctctgtctccctctcatcctcccctgccagtgtagacatcacaggaggatgcctccacacaccattggacaagtgagttcacatctgaggtgcatatatttttcatgatagttttaattgtccagaaaattaacaatgaaatgatggagtggcagaaagaaagcaagaaaaaaaccctgaaaatttacaatctaactcagagagaacaacacttttagacatcagggcagtgagaaaagaataaatactttgttaatgaataaagtgaagcagaacaaacaggaacgtgtacctaatagtgctggccccgggcgggcatgtggttcagggagatgaatgagtgaagtggtaaataactgatggcgaagaggggccctggctccctgtccctgctgccagacagctctgaggcaggattgcccagccctgctcataagaaccccctcccatgtcagatgttcctcccctcccatctcacttccccacctcctcacacctgcgttttgggatcacctcgcaggtgcgccgcccacccccaacaccgtgtcttgagtctgctttcagggtgaccacataaacacatgtcatcaagtccaatggacacgacctcctgtccagtggtaccacaaggtgtggtgtgtgcagactgcaagtatttcttgttcttccaaatactaaggctgcgctacgtgtggtatcagtcattgtcactgtgttttctggacgggcatgtcccagagctggggagtgagacttccaccagctggatgcaaggcaccatggcactgcgtatccacctgcgctccctgcatccgagccacctgctccagcatgtgcttaggcggaagcactcgtctagcccccacaggaagcaactccaccttatataggagacagaatttcctgctgcctggccccactgcctgcaagctcttggtgtgtttttaattccatatcttttggtcttgacaggcgcgttgcctgttactagttcccagctgctgggcagagctgccctccagtcactagggcttctgttactcctctgtcccagaaggagcctgctcttccagctccccaaagagaggagggatccaggcttgctctaagagtcccacacccaagacattggccaactcatagcccgggccacctggcatttgttcagtcacctgccaaacactcttctcagctccccttcaaaatcccacacctttaccctgcatgcagaaatggaggtcttggggggcactgcgatgcaccagtcttctccctgctccacacagtgcctccacctctgccctcctgtctctcctctgctcgctctgtgatgctcagtagggctgtgagtcagccccaggcctggccgattcccaccccagcatttccttcaaaagctccctgttccctttgccccacagccttcctgcaggttccaaagccaaggtctccacctggcctcccgtgccaactcccaaccagccccggagcccacactaaggccacaggagagtgtccccatgtgacaagatattccagtattccaggcccgttcccaccctgccagcttgtccttttagcctgtctcttctcctattctgcccaatcctgctggatgacctggtgtcactaaatatgcctttgttatgaagaattacccaaaacatggggatgagtcaaaagattactatgtgaccctctgacagccacaccagagcattggctgccaagtaggcctgcctgagagtgaccagatttcctaggggaggtaatatggtggtttttaagaaatgtccacacactctgataatccttccccaaagggtagaacttagtttccctccccttgagtgggctaggcctagagactcacacctagagaacagaacacaaaggaagtgatgagctgccacttctgagattaggttataaaaagactgtggctttcatcttgactcctcccccttcccctccctccccatgtcccttttcatcactccctgggggaaggagccaccaggttttgtgaccagccgtacagagaggcccccttcacgcagagaagatctggagcctctgccaagagccacctgagtaagcctggaagcggattgtgaagcaccttctgaagactgcagcccaggctcacagcctgaccgaaacctcatagagaccctcagaaactgtgcaacacaagaaatgtgtgctggtttaggctgctgagttttagggtgacatcgcactaaaaaattaaattgtttgttggttaaggaccagactctatgaagttggatgttaacttgttgaatattgatacattgcaaccctttctgctggcagagtaaataacctgaaagatagtggttccattgtcctacaggacattaatcagtcgcgtatctgactttatcattggactctctcattctgatatgcactgtcagtttttccagtcctttgaaccagctttatcattttagttctctcactaatgaactaagtaaatatttgataccaaaatatttgtgggggaatcatatgttagcttttgaggcttgccctttgatactgtgtcattctgtgcctttgcacctctgccctgctttacctgtaggtggaagcccttccctgtcccagctacctgctgtaaaaaagctttctctgtgccctctcgggagaagctttccctggccctgggaagaagacatccccgccctctccacgtccccgtggcactttgctcatgaggctatcagagaatgtctcagaccacgtggatcatgttggggcccaaccccagctgtgactgctgtccaggcctttgtgtaggaagtgagggcaggctggggcagggctttgcgggggacacatcttcagaagaggctggggtggtcctggcgacccgttcgaataaaggagtccttttgcaaggagttgtcatgcgtgtgccaagccaagggcgagagactaaggctcagcttgggggaaggtgcggatggaaaacttgggcctctactgttcatcacataaaaaaggagagaaaaatgcaccaaggatagagggacagagacaaaaaaggagagaaaaatgcaccaaggatcgaggaacagagaggctggcgtaaagggagccagagtgtgcgaggagaggtgaggggtgaggaggggaggccaggctcatcaggaagtgctgtgaggctcctttaaggacaagcccctgcatccggcccaacttcataaaggacaagctctgagtggggcaatcatgagtttcataagggcatggaaaaagtttcatttgtctttgagtcttcttcctccatccagcacataatacatagatgcttgttaaccaagagattcaccagtaaatgaatgtctcttatatatttttttaaagcaggtatcctgaaaaacattttcctcaaaatatctgctaaagcattacttattggtgcctctaagcacatacccttctcatctgtgttagcaccacccttttctctttcttgtcttaaggcttccacaaggctatcagtcagtttttactgcctaacaagccaccacatttcctattgcccctgtaacaaactaccacaaatttaatgacttaaaatgccacacatttggccaggtgcggtggctcatgcctgtaatcccagcactttgggaggccgaggcagttggatcacctgaagtcaggagttcgagaccagcctggtcaacatggtaaaaccccatctctactaaaaatacaaaaaattatctgggcgtggtggcatacacctgtaatcccagctacttgggaggccgaggcaggagaatcagtcaaacctgaacccaggaggcggaggttgcagtgagcagagattgcaccattgcactccagcctgggcgacaagagagaaactccatctcaaaaaaaaaaaaaaaaaagctacacatttattctcttacagttctgtgagccagaagtccaaagtgagtcttcctgggctaaaattgaagcatctgcagggctggcttcttctaggggctgcagggagaatctgatctttgccttatcagctgctagaggcctctggcattcgtgggctgcatcattccagtctctgtctgttgccataacttgtcttctgtctgacctccacatgtccctctaacaaggcctttgtgattgcattgggccaacctggatagtctgggatgctctctccccatttcaagacccttaacttcatcacattcacaaaggcccttttcctatggaaggtgacatattcacagattctggggattaggaagtggacatctttctctgtagaggggggtgaggtctgttatttggcattttgttcaaggttaagcaccaaaaccatgcatccctctcacaatttgggcatttttcaatccgagcttggctgactcatgcataggcagcagctgttgggccagctgagggctggctggttgaggatggcctcagctcagacagctcatctctgcttttgtggcctctcaccctccagcaggctaggaggggcttgtttacatggaagctggacatggttccaagaaacgaggcaaaagcactcaaggcatattgaggtgcagtctcagaattgacccagaaccccttctacctcattccactggctgaaacaagtcatgaggtcagctcaggttctagtggggagtaagtcagtggagctgccaagtcatattgcaaaggtcaagatatagagagtggtgaaagattgcagccagttctgccatatgctatggtaaacacctagctgctgcaaaatctttcattccttgcatattatcaagtacctgccagggcacagcttacaaacaagaaaacagctccaggaacccaaactaccaaagactctaagaagcagccccttgtcctgtctgtaagaactctgctcctgaccatcacacactgggttcattttcaacctactgctctgtacacagcagggacctctgtgtgctgctccctattcctctcttcctaaataaacctacccctccatcaaggtcaaagctattccaacaacttgaagccttgccactatttcccacaagggcgtcagtctccctccccattctacagcccacagcttccatgttagcttccatgcaaacccaaggcttcatttgcccggccctgggccagcacagcactgctgaatctgtgcgctccgtctccaacagcgacaccgtgtggcaggaagaaggaatggtagtaatggagtaggtgcaggtttttccccacttaggtgtgaagactgaccctcttctgtttataagccctatggtggctcaaggaagggatgttgtccttcctgcctttaaggcattaagacgcataaggacaataaaattttagtggctgaaaaataaacagcaggattgcgtttacgctccacttggagcaggccatcctggttatacacacaccttatagttgctttctccaaaacacatctggttttggttaactttttacttcaatataattttaagcttaaaaaaattgcaaaaaatagtacaaggatctctgttttgccattttcccagattcaccaattaattacctatttctccatttgcaatgaaagcaagagagaaaaagacagacttttccttggctatttgagagttaagttggagaaatattccctaatttactgatgattacttcagtatgatttctaaaaatacagacaatttcttatacacatacctatagtattattaccaaaatcagaacattttacattgatgcaatactgttatctaatccacagtatccatttaaattttatcagttgtccctacagtgtactttatagtaatattttttcagtccgcatacctttttaaatccttaacgactacatgcatacattcagttgacagaatattgtgagaaactgatgaacaagtttaatctttctacactttttacctagcagtgcaggtaagcctagactcgattgagtaatacatagtccattgaaagaggtatggccttccagtgacagtgtcaattaattgacctgcaataagtccaggagagaaaggtggaactgtccttttagggccaaacatttctgcaagcctgaagtcccttcctgagtgtctcctaggcaaaagagcaggattccaggtaaacttccaaaagacactgtttcagaaaaacacatctggccatgtcaactacagagtacagagagacacaaggacatgccagaccaagaacatcggccttatatgccatagctgagctttgttttgatgcaaaaataagtttctggcacttttatgccactgtcaggaggaagctgacagaggtagaagtgagggaggtggctaggctgcatttccaggatgcctggggttgggacagcgtgtttccctctcgggtctaggaaaaaacatgttttctccagatttgccacctacagaaaatcttattatttgccttatgaatatgaagtcattgttcaaagagttaaaaataaaataagtggggaaggctatatttggctaggaatggtgctaataccgggttatataacctctcccatgacactccatgcatggagcatctccaccaagggttatgtgtggaaagtgcacagaatgaattttacagattccatggaaaacactgtcaggccccagtgtccttgttgtcaagacaacatcttattttcatctttcttcttgcaagttctctagcaaagacattataattaaaatcccaacataagaagcaaccgtatgtaaaattcagagcacagactgtgacaagcagggaattgagtgtggagtcctgtggtcaaactttaatagacttaggacaaaattgtattgtctgtgggcctaagcttcagggagctttggagctgcactgaatcactttctagggtttttatggtttggggttttacatttaagtctttaatccatcttgagttaatttctgcataagctgcaaggaagggctccagtttcagttttctgcatatggccagcaagttttcccagcagcatttgttgaataggagatcctttctccattgcttgattttgtctggtttgtcaaagaccagatggttgtagatgcatggtgttatttctgaggtctctgttctattggtctatatgtctgttttggtaccagtaccatgctgttttggttactgtagccttgtagtgtagtttgaagtcaggtagcgtgatgcctccagctttgttctttttgcttaggattgtcttggctatacagggtcttctttgatttcatatgaaatggaaagtagttttttctaattatgtgaagaatgtcaatggtagtttgaggggaatagcactgaatctataaattactttgggcagtgtggccattttcacaatattgattcttcctacccaaaaggatggaatgtttttccatttgtttgtgtcctctcttatttccttgagcagtggtttgtagttctccttgaagaggtccttcacatttcttgttagctgtattcctcggtattttattccctttgtagcagttgtgaatgggagttcatttatgacttggctcggaatgtttgtgatttttgcacattgattttgtatcctgagactttgctgaagttgctcatcagcttaaggagttttggggctgagatgatgggattttctaaatatagaatcatgttgtctgcaaacagagacaatttgacttcctctcttcctatctgaatacccgttatttctttctctcgcctgattgccctggccagaacttccaatactatgttgaataaaagtggtgaaacagggcatctttgtcttgtataggctttcaaagggaatgcttccagcttttccctattcaatatgatattggctgtgggttgattattttgagatatgttctaccaatacttagtttattgagagtttttaacatgaagggatgttgaattttatcaaaggctgagctttttctgaatctattgagataatcatgtggtttttgtcgttggttctgtttatgtgatggattacatttattgatttgcatatgttgaactagccttgcatcccagggatgaagccaacttgattgtggtggataagatttttgatgtgctgccatattttgtttgccagtattttattgagaatttccacatcaatgttcatcagggatattggcctgaagttttctttttttgtcgtgtctctttccagttttggtatcaggacaatactggcttcataaaatgagttagggaggagtccttccttttcaattgtttggaatagttttagaaggaatggtaccagttcctcacctatttctgatataatttagctgtgaatctgtctggtcctgggttggtaggctaccaattactgcctcaatttcagagctcgttactggtcttttcagggattcgacttcttcctggtttagtcttggtagggtgtatgtgtccaggaatgtatccatttcttctagattttccagtttatttgcatagatgtgtttatggtagtctctgatggtagtttgtatttctgtggggttagtggtgatattccctttatcatttttcattgtgtctatttgattcttctctctcttcttattagcctagctagcggtctatattgttaattttttcaaaagaatagctcctggattcattgatttttggagggtttttcctgtctctatctccttcttctctgagctaaattagctcagagaattttggattagtttcctcttgcctctctacctcttttaattgtgatgttaggatgctgatttgagatctttctagctttctgatgtgggcatttagtgctataaatttccctcttcacactgctttagctgtgtcccagagattctggtacattgtctctttgttttcattgctttcaaagaactccttgatttctgccttaatttcattatttgcccagaagtcattcaggagcaggttgttcaatttccatgaaattgtgtagttttgagtgactttcttaatcctgagttctaatttgattgcactgtgatctgagagattgttatgatttcagttctttttcacttgttgaggagtgttttatttccaattatgtgatccaattttagaataagtaccatgtggcactgagaagaatgtgtgttctgttgatttggggtgaagagttctgtagatgtctattaggtccacttgatccagagtgctgagtttaagtcctgaatatccttgttaattttctgtctcattgatctgtctaatattgacagtggggtgttaaagtctcccactattattgtgtgggagtctaagtttctttgtacgtctctaagaacttgttttatgaatctgggtgctcctgtattgggtgcagatatagttagaatagttagctcttgtttaattgttccctttaccattatgtaatgcccttctttgtctttttttatttttgttggtttaaagtctgttttgacagagactaggattgcaaccctgcttttttttcattttgcctcttaatccgcatgcctgagcccactcgtccagttcctaagatcttattaggaggctgccaatcaccagttacaggtgtttttatctattgggaaactgcctttccctagcactggatgcgaccaattattattttagagagggagtgttacaaccacctgaccatcacctgatggtcacctggcattcctggtggggaagtggacgtcctctcctgccctgtttgtgtttgactagctatccactataacaatatcatatgttcaattcttttttttttttttttgagacagagtctcactttgtcacccaggctggagtgcaatggcatgatctcaactcactgcaacctcctcctcccaggttcaagtgattctcccacctcagctgccccaagagctgggattacaggcacctgccatcatgcccagctaatttttgtatttttatagagatggggtttcaccatgttggccaagctggtcttgaactcctgacctcagctcatccacctgccttggcctcccaaaggttgggattataggtgtgagccaccacaccctgccaaatgttcaattcttaagaaagaaaaatctaacaaatcctacactaacaagtgttgaaagtgtgctaggaaattgtgaattcgtatacactgctgatgagacatctttgaagagctagctggtaatatcagataatattaaaaattgagcttgtcccatgactcagcaaactttattgtagaaaatctaggtatcaatctctgaaatgcatgcacaataggaaatatacatggtgtggttttttttaaagcaccatttgcaacaagtaaaaactgaaatgacctaaatatccaccaatagcaaaatagataaagtatgacatattcatatactggaatgctacacattgattaaaataaacatgctattcatgcattgtcaacaagaataaatcttaaaaaacaattggtgtttggggaaaggggaatagagagttgttgtttgatgggtgtagagtttcagtttggaaagaaagaaggttctggaagtggatggtggtgatagttcgaacgtacttaatgccactgaactgtacagtttaaaatgtctaaaatggacccatgttgttcaaggatcaactgtacttcaatcaatcaatagaagtgagcattgactttgcttttgcctttaaaaaatcctttaggaaaacaacacatcttatatttttctttgctgggggggcttccctgtgtcactcaggctggagtgcagtggcgctatctcagttcactgcaacatccacctcctgggcttgagagatccccccacctcagcctcctgagtagctgggactatagacatgaaccatcatggctggctaattttttaattttttgtagagatgtttttgtagagtttttttgtagagaccagccatttgctcaggctggtcttgaattcctgggctcaagtgatctgcctgcctcgggctctcaaaatgctgggattatagacttgagccaccatgtccggccaacaagcatcttttgaagtacaaattattgaagggtttacagcacttgctcactcatgtacgtgaggtccctgcactggttctttccatcaaccagatggatccactggtgggaggaagtggatgatagaagtggggtccatgaggcactgctcagaggactggcaggacagtaggctgacaggacatctaagggaagcagaaggtctgagggaggaagaggagaggcagagcccaggcaacctgggccccctgcctggccagttctgggatgctgccctcagcagagctgggggagaactgtcacactttcactgcccttgccacccggctcatatcaccaggcaccatgccactgcagggacactcctcaattcaccaaccagcaaaggacccctggaatttttcttgactctgaggctttagtgaaagtagtgaggaaaacatctaaaaataaaatcgtgatgaattcaagatgtatgtggcattatgcttgtcagaaaaagctcaatgacttaagttttgtccccatcattccttaggagccaccgggtaaacatttgcacctggctggagagggcagagaggagccttggttcccatcaggccaccagccctaggatttgccagcatcattctgtggtgcctactcacacacacacgtgctctctccccagcctctcctcttcagcaccctccctccccagtgtccatacattttcctacatctggttgtggacggaaatgtctgaggaatcacagaagggccctgatagtgaaatagacacaggggccagcctgcacccttcttgacccttgggcttgacctaatatctttgcagggtagttcacagtctgaaccaggtgagcaaacttcttgtgtgaagagcagacagcaaacatttcaggctgtgggggccacccagtctctgctgcaactggttaacttgctgctgtagcttcaaagtagccataggcaatatataaacaaattgtgtcactgtgttccagtaaaactttattatacacactgaactttgaatttcatataattttggggtgttttgcaatattagtcttcccagccgcctaaaaatgtaaaatccatgggtcatgcaaaaacaggtggctagccagatttgtcccaaggatcataatttgccaagccatgacctaaatacccaaagaattattggagccaaaaccacagatgccacccaagaaccatgtgctcaggtaaaaaaagctctgtgaagaaggggtaaaaagagcagagagaaatgttgacttttctcttaaaaaccatctactcctccctgctcaggctaattagctcactctccaccagctgcagcaactgaagctgaaacagccaaattcccgcagcagcaacagctaatgacgcttcccagcacctcatttgatcattcctgcaaccgattaggtagatacagggaaggaaactggagagcagacaggatgaggaccgtgcccaagacctcagatagcacatggcagaatcagcatttggacacaattggactagtccctgctgtccccactgtgacacctttgtgaaaattgtgaacaaatgcaaaactggagtgtgatattccccttcctgtgtccatgtgatctcattgttcaattcccacctatgagtgagaatatgcggtgtttggttttttgttcttgcgatagtttactgagaatgatgatttccaatttcatccatgtccctacaaatgacatgaactcatcattttttatggctgcatagtattccatggtgtatatgtgccacattttcttaatccagtctatcattgttggacatttgggttagttccaagtctttgctattgtgaataatgccgcaataaacatactgtgcatgtgtctttatagcagcatgatttatagtcatttgggtatatgcccagtaatgggatggctgggtcaaatggtatttctagttctagatccctgaggaatcgccacactgacttccacaatggttgaactagtttacagtcccaccaacagtgtaaaagtgttcctatttctccacatggggactgtggtggggttgggggaggggggagggatagcattgggagatatacctaatgctagatgacgagttagtgggtgcagcgcaccagcatggcacatgtatacatatgtaactaacctgcacaatgtgcacatgtaccctaaaacttaaagtataataaaaaaaaaatgcaaaactggaagagccaatcctttaagatgagtcccatgtgggtaactggccctatatttaaaatatagctgagtggctatttgctgattagaggtcacacaggtaactcacacaagcactctgaaaaccagcacctttttagctttgggactctcagagcttacctgaaccaaccaatcagagctcacctacctttgcaatcaaagtttggctgaccaatcacggctcacctgtatccaatcagaactcagctgcattgaccaatcagaactaagcaagtttgactcctttatgtgcatcaaccgacccgattgggatcttgtgtgggacctttgctacaaaacccaaaccctctctttagccccgggaagataactttcttttacaccaaaggctgtgtctccccagtttgcaaactgttcactgggatgaagtctctttcctcccaattttgtttttcagggaacttttgctcacaaaacgaatcacagctggcccacagcagagctgcaggcggggcagagaacccacagcagagggctctgtcaccgcagaaccaggcagatctgtgtgagcagcaagcataaactcagggcagcaggctctgtcttgagggctagaaggaacgacggagccacggcgatggtctttctccgagatgcatttccaggaagttggaattctgatcttactgagactttattttgctgagcttggcattgactacttggacactgagtcactgtttactgctttcgaaaataagacaagctcatgggcttgctggggatgaagcaagaaacgtgtggccccatcaggactggcgcccagagcccgggtcaccctgtgcacagaactgacaccttaaggagacagagtggcgccggcgccctgggccacctggagggcccgagagcgggagagggttcagggagggtgtctgtgatgggaggagcaggcccaggacggaggaggacagagtcgggggtctcagggcagtgtgtgccttctgccagtcgctagggcggactcgaggttgccctccgcgccttcctcgctgtcacctcccacagccaaggcagctgccaaggtcactcctaaatacatcccaagtccaccccatgccgctcccctcagccgtggtcccagtccagaccacgattccgcccagaccctgcatgacccctcccatctcaggctccacttggggaccagagggatcttaaaatatggatgggacagtgacgcctctccttaaaagctcaggaaagatgaaaatgtcctcatcctctctcaaggcatttgcagttcccctaccccgggcgctgccccacccctcacggactcctctccatccccgggtccccacctggccacctccctcaggaaagctcctggccctactcaccatcagtctctttaggacctctccactcaccctctggcgttcacctctccctcttgcccgttagagtgaggccttgatgaggcacctgccttattcctcctgcccgtcctgatggctcctgcccacctccacagcagagcctgcttctccgtgcctggaagctttccccagaagagcaggtctgcatgtacacgcaggtgcacacaagcaacaggccgggagcacccctcacccagagactctgccagtgtgtgtgcagacctgagctcccttgccccaggaggaacagtgctggtgtgtgtgtgtgtgtgtgtctctgtgtgtgtatctgtgtgtctgtgtgtgtgtatctgtgtctgtgtgtctgtgtatgtgtgtctgtgtctctgtgtgtctctgtgtatgtgtctgtgtctgtgtgtgtgtcagtatctgtgtgtctatttgtgtctgtgtctctctgtgtatctgcatgtgtgtctgtgtctgtgtgtgtgcctgtatctgtgtgtctatttgtgtctgtgtctctttgtgtgtgtatctgcgtgtgtgtctctgtgtgtgtgtctgtgtatgtgtgtctgtgtgtgcactcacactggttctccagggttcctcccaggactgagctgaagttgtccacagcggcccctgctggagcacacaccttgattctctgcctctgctccccaggctcacttccccattctcttctggctgcttcctggcattgcctctcagataagccacttcgcgctgatgggaactcagatgctgggagtacacatgcaccttggtgtcgagctcagcggctggcacagagggagggagagaaggaggtggactaccaagttattgtctaaacatcagcctctggtcaccgctcgtgtgaggcagtgagcatcccttcttgccccctgggctctcagcggtcagccttgggtcctggggagacttggccaagtcccggttccctggggctatctctctcctgccctgcgcttttgagtgtcccctccccacatcccctctttcatcctgacccactactctggttgtaaataaaataagcagactacaacagcttactatcacactgttcagccatggactgccttgttcagccatgaactgccttgtcttgaaggaatcctagtattactacttgaatcctaatcgctcttaaatttgaaaaattaaggctaatggaatttgtacaacagttgtatcaagaggaaagtctatgataattactataaaaacagcccagctccatcagctttgcatgggtgatcgctccagcggtgtgcccatcctcagctatagtccctttctacagattaggaggcagaggcctagtgaggctagggcacttgcccggatcccttgcaaatgtttggcccatgtccctaaccaccatgctcttatgtctcctgttttctgggtcacttctcactatgaattgggggatgtaaatatttgcataaattggatataaatatctgaaaggtttcaaagggaaggaaagtgtgtgcctagcgtctccactgcttatgcacagaagagacgatgggatgctagaggagcatgctgagtctctctgtagaacaaaattatcaacccgttatccagagcagctgaaggaaagggcgggactcacccagtgactgagcaaccagtgtgagtggagttggaagggcaaccccacccccgtggttacttgaggcaaggaccgacccttcatcaagattacagaaatgaccccatcctttaactcattattcactgctcatacactaaacaggttgctttctttggctctcccccaccccgaccctcgctctctgcctttctttccaaaacctccacttttaggaaactttggctgctgtttgcaaaattagttcccaggtcaagacattacatttggtctggaattttcgggctccaccttttggcaaaggaccacggaagtggcctttggtccacccagccctgtgtttttcagcgggatgtgctgatgccgcagctgcactccggggctgacagtagctgaatgttcatcagcaacgcttagcacagttggccacacctccagggcccaggcacaactttaattcagccacagtatcttctaattttccctaatgctcatgagaaaaatgtgctctctatagtttttatccctaaaggttttcttttcttagctgctgaagccaccgagattttcacagatggccagcacttctcacagcagtggtgcccagtgacccgtttaataggggtatcagttcctgttccggctcagacacttagaatgtggttctggtttccagtaatttttgatcctggaaacaaaagcggatgtattatcctagcaccaatatttctaatgcagcctgtccacgtaaaagccccggagggctcaagctctcgagatgttttctggagccataacactggtcatattttaagttcaaaaccccaaaaagaatattgatgcttcaatggtggtttctgatctccaggaaggctggggtcagggaggcctgtgcttcctccagcctcggccagttaggcaaggagttgggtcctgagcctcagtttcctgcctcacagggaggatgaaaggggcactggtaacacatttggcctttgctgtccttaatagactccttagagccatgtggaaagttccaatggactttggcagaacctgaaggggagtccccatcacacacaagcccttgttccccacccagagcccctgtgaaaggaggagggggacggccagatcccagaattatgggcagggatcctgagtcaggttatgggcaggatcccacaagctcccatctctcaagcccagtccttacccttcccttgtggagcaggctgggcccagaacccaccgctcccaaggtcatggtattccgcagacaacccaggtcattcgggcaatccctgggtgatgatgacaccttttaaaacatatattacagaaattttctatgtttgtgtaggaaaattagaaaatcaaaagaaccaaagccaagaaacattgaaaatacctataattccccttcactatgatcctacttcacaccactcatgttttgatgtttttctttacagtatgcattatatatatttatatatgtacatccataattgttttcataaaaatgagttcatcttgcaatctattattctcaactttccaatggttttttggagtccccaaatacattgcaaaagattcaaacaacataaaaatgaatagagccccttccccatcagccctcacactcatgcatccccttctggctgctgccgttccctgctccagtaaacaatgctgccgtcaacatcttcccagggctccagctcacatccctttctctggagcagacacagagaagtggaactgctgactcaaagcatgggcacactctttattttgataaatacaccagtttgttctctaaatagctgtactgatgtgttctcctgaaattggaacagctgttttcccacacctgctaacatttgaaatcattacaaactttaatgtttgccagcctaataggtgaaaagtattatctcatggctgttttagtttgtatttccctgaatactggtgatgtttacattggccagagcatctccactgctgtgaataacctcctcacatccttgcccctatgtagtgagtcttctacagtgattctagaacttctttctatagtctggcactaaatctttgtatattttttctcctagttttttaaatgtcttttaactttgtttgtagtacctttatcacagataattttaaaaatatttttatgtaatcaaaaccttcacttttccttaataagttttgtgagttttttgaaaatgtgtccacctaaataataaacagagactaaataaaaaagagactttctaaaagaaaagatacttactcgggaagaaagcattgcaataggaatacatattccgtagtaaattatgttgtattcagagaggtaatggaagacaaaggtttttaagggaaaaaaaaaaaacctttcacaaatgtcatatgcatataaactgcagttttagtttttatatttctttctttcttataaagaacttccagaaacattaatgacagaaaagagggatctattttttcccaaaattatatccaagtatcacaattgaatccaagtatcatttttgaacataacgaaatttcccatgtattggaaaggctacacacaccatatacgaaggtattacttacagtacttgtgtgtgtgctaaaattgcattctgtgtgctctgtttccttgaaagtcatttccatttgttgagtcagtgcctgccttttctggtgctgatttgctcctctctgtgcttaagaatccttgtcatccctgttgagtttatcttagcctacagcaggggttgtgatggaggtgctggaggtggttgagatgaagaaggtaccttcctctcactcccagctgccgggatttctggtgctctacccagcctggctggcctcactgctgtactgccctgttgaccgtatgatcctcttccttcgcttctctctgctcagcagaaggtggtgggaagtaaagagctctcagcctggggtgttagatccacctacccagatcagcttcttgaggctactcaggagtttcctcgctttctatatccatggcctctggcttcagaattcccaatggcttctatgtgtgaggcttttacctccagcagtgtctgagctgtgcggtcctctaccctgcttctttatggatcatatcctttccactttctctctctctcagaaattcatcagaacttctacccaatgcagtttcccacattgaggatttatacttatctgacattttactggatttgggatgagccgatcttctcattatccttctggagcatacagttctgcattgtcattgcacccagctgtggagaatcccacgcatacatatcctaaaatgcattgctcggcaccgggcacatgccactcctagttttaaatattattaatagtcacaatgaacatcactacacacatatcctggacactttgttatttctttttgtttgtttttttcttttttttttttttgagatggaatctcattttgtcaccaatgctggagtgtagtggcaaaatctcggcttgctgcaacctccttctcctgggctcaagcaattctcctgcctcagcctcccaggtagctgtgactacaggcacccgccaccacatctggctaattttttgtatttttaatagagatggggtttcaccatattggccaggctggtctcgaactcctgacttcaagcgatccgcccacctcagactcccaagtgcttggattacaggcatgagccaccacccccagcctgttatttcttatagtagattcttagaaggagatttattgggtcaacctatatgacaatctgtattgcctatgaccataaatactccccacttatcatccggaagagtttcatctgtctgtgttcccaccacctttagagaggacctcctcaccacccagtcaggacagcctctgctacttgttttctgtgtgcctaataggtttgctttgaaatcttatttatttatttttttgaaaaggagtcttgctctgtcgcccaggctggagtgcagtggcgcaatcttggctcactgcaactccgcctccctggttcatgccattctcctgcctcagcctcccgagtagctgggaccacaggcacccgccaccacgcccggctaattttttgtatttttagtagagacggggtttcaccgtgttagccaggacggtcttgatctcctgacctcgtgatccgcccgccttggactcccaaagtgctggggttacgggcatgagccaccgcacccggcctgctttgaaatcttatcaaagccctgtaggctcttactctgaacttgtcccaagaccttgcagttgactttgatgaagccaaagtctgttctgtcttaaaatgagccctgagcagatgactgtgcctaaacttccaccattaggagcttgcttctggcctctgccaaattcccagcttggtctaaaacccctagccctggctctgtcaggcttccagcctcaggaactaggagggaccagccccctggggatctgtctgccctctgtgggtccatcatgggtttagtgcccacagcgagtcatacctgcatgatcatctggttaccttcattttattattaaaatcccaaaccacttcatgaagcattgccactctggggaaatcatgtctttgtgaagttaagtaacttgacttgagcaagtcaaggatttatacccaagcccagctacctgtgaagtctcagcctctatagaaactgccaaaaaagtcctgatggcagcctgctttgggcccaatcctcaaacgtggacaactctcacaatagaagggacatataagttggggatgttatagattctgacgatgtcagaaacagtttttcccctgatcaccacctcccccaggtatcggctcaaaagagaatcactgtacgagctgcagaggtggggactgatactggtgtgttttgtggagaatccccagtgcccagagcaatccttagtgcgtagtacgtgctcaaatgtatttttaaatgctgaacaaatgcttctcagttgttagcttgcaagaagaggaagaaaggcacattgagcaaaaggaagagtgtggacatcaattctaagcagcgtcccatttctacacacactttcagccacacaggaagcactggcttaccctctccatggtggctgtacccccatctcatgtcctagtaactcaaggactttccagtcaacatggtaaagttccaaaagttatatcctcttggccctggcagggaaagattctgcagttcctttgggttttggaatcacgcgcttcatatgggcatttctaaggatgggacataaagcacatgagctctggggaaaaaggactcagcagagagtgggtccatgtgggcatgattggtggaggtggctgtaaagaacaagatcataggacgtatgaccccaaccagggaataagatgagaggccctagtgaagatgaacccatgaggaggcaagagagtcaacagtgatgtcctgccaagaccagaaaggtgcgttcagaggaattaaaccaagagcaaggatgggggcagtactaggatcacccctgtaatcctagtactttgggaggccaaggcagctggatcacttgagcccaagagttcaagaccagcctgggcaatatggcaaaaacctcatccctacaaaaaaaaatacgtatattagtcaggtatggtggtgagcgcctgtggtcccagctactagggaggctgaggtggaagatcacctgagccctggagacggacgtagcggtgagcagagattgtgccactgcactgcagcctgggcaacagggtgagaccctgtctcagacaaaaaaaaagtaaacactaaaaaaagtttttaaaaaatcaagagcaatagaatacataatctgggatgataaagatcttattaaggaattgttcatttaagatttcatcctgaattggtagtcagctgggaagaatttagatggttgattcttactaaatcttgttctctgcaaaaaaggcattgctttacacaataaatatacgtctatttgattctgaatgtctcaagaagggttgctatttaaaggtttcatcccataaaacactttaatgggtgtttatgaggcagttggcctataactaggaataaaaggtaataagttggctgacagaatcagtaccatattgttcgcaacaaactgaaaagataggacaaacagctgggatttctgctaactgatgtccagtcggtatttggatatctccaatgacatgaaactcactactgctcagcaaccataggaagacactggccagcccatccactcatgcggtgctggaaccctttttttattttaaaatatttaattgacaaaaattgcatctgttcaaggtgcgatgtgatgcttcgatctagatatatacaggtatattgattaccacagtcaaattaactaacaaatctatcaccacccatgattaccatcatgttgaggggatgaggcagtgaagacactaaagatctgctgtcttatcaaatttcaagtcaacaatacagtattattaacacagtcaccatgctgtgcattaggtccccagaacatgtaactgaaggtttgtatcttttgaccaacatctccccagctctgcatgagtggatggtcagcattttccaaacccactctgaagactttgcctggttggctacatcaatatctcctgagaaagtacaaaagtccaggcccagtcacagaaattctgatgcatagtttggagatggatacagtggtgttggtaaatgttgaacaacaggctctccagaaaacacagaaatcctcatgtagagagcatgcccactcaggctgccagtatgatgtcaccaaatgtgaactggggaaggaatatgcagaagccaccattacagagtatccccacgacatagacacagtggatgaaattagccttaacggcatagaccatgaacaatcgtaaaatagaaagtgatgagttttgtgtaactattccctttgttttaatatgatttatttcattgtaagtgtacataattcaccttttcataaaggctgtatgtaaaaactggctacagagaatcctgacagtttaacaattggctctcaggttggagcgggctccagcaccgcctggatgggcctgaacaccaccgccccacataccctggattttggaagagcttaacaggctctttcagctttgagattccatggcttcattattccacaataaatggaaagaaggccactctggataaagcagtgagccaccccctcccacgccatgtgggggctgtccagcctcggcagggcagcttctctgtacccaggctgcctcctgaagcagcttcctctttgcatagtcttcagtggctttgtagactatctctggggtgctgcagaaccccatgaaggagagtgtctgcaaataatcaaacagcaagaaagtaactttaatttcatgtgggcaagcagagaaagctaaaatagaagcgaggatcatagagcaggtcaccaggatgaagactgcatgaaggcaagggctttgatgtactcattgtcctggccccggcatggaggtggctggaaggcaagagggaggaggagggaggcagagatggaaggatgaaggagaagaaggaaggaaggaaggaagggaaggagggagggacagagggagggatggagggagagagggagggaaggaaggagggagggaaggagggagggaaggaggaagggagggaaggagggagggagggaaggaacgagggaaggaaggagggaagaagggagggagtgagagaaggagggaatactttctttcagagggttcacattctgagaaataatgctagagcagctttgccctaaacaaacaaaaggaaagtttttttaaaaagatcagaacctggttggttcaaagcactttatttgcattctcattaatctctcacaatatccctaaaagacggatcttctcatcccaatttttcaggaggggctcagaattattaatatttcacaggttgcccacagtgcttcacatctgacagttggcaaagacagacttcagtaaatgcctctccctacctcctctgagctctccgccagcccatcccacccccctccctgctggagttgatgtcctggtggggagagacaggggaaaaacccacacacatgctgcctgtccatggatgctaagtgctgaggatgacatctgcaagtgggaaccaagatgggagtgggagatggcacaatttaaaacagggggcacaaaataacacatgtggacatttccccctcaaggagggggagcttaattcccatctcccgctttaggggagccagacttagtgagctgcttccaaagaacagcgtatgaagagggaaagtgggcaactttacaaaggaggaaccgggcggctaacttctgcacccagtgatgcctgagaacaggctcagctgtcaatgagggtgacattaccacaaactaaaaacgctgaatagggggacttcacaaaacctgcagtgtgattgcgctgaaaagaagagaggatggaagtgcagccatgcatgcctgtgtgtgtatgtgtgggtgtgcatgtatgtgtgtgtgagtgcatgtgtctgtgtgtgtgtgtatgatggaggcaaggagaataagtgtgtgtgtgtatacataaaaggttaatatctgggctggtctgcaatgagaaggcactaaatttctctgcttttctccctaaaaccacaattatgaagagacattggagaagccagattggactgtgctagggaatgtttgctcagaactaaattggggtctccagctggctttccaggccagtggtaaccccttctttgcagcccgttgtcctcagattttaaatcatggctgctggtgacctgggtccagcccagcctgggatgggttgtgtgagactccaccagatgtcgcaggcacagcctccagatgcagctctcctgtctctctctcctggaggctgtggcctggggccaccctgcagggagagctgctgggtgtgggtctccagggctctgcatctgcaaggcttgttcacttcactggtacatgcaggggcgccctgggatggactctgtgcctatgatagcctcaggccagcaggctccctcccctccatggaggagaggcaggagcacttaggtgggactcatctatgaccctgtagccaagcaggcaaggcatgagggattccccacaactcctaacataaacttcgggctgggccagagcagctgttgcagggcttcagctgtgaggaagggaattctgtgtctgatggagcccagcaagcctggcggctcacaggctgaatccaaacaatgctcagcatgtgtgttcacttcctgggctattgtaacaagtcatcccacattcgggtggcttaaagcaacagaaatatattctctcccaggtctggaggccagaagtccatagtcaaggtttcagaagggccacagtctcctaacaggctccagggcaggatccttcctgcctcttccagctcctggtggctccaggccttccatggctgtggctgcatcgctccaatctcagcctccaccttgacattcttccctgtgtgactctgtttctgtggctcttctcttcttataaggacaccagtcatactgggttaagtgcccattctactccagcatgacctcatctcaatgtaaagaattacatctgcaacacactaggaggatgttgttctgaggttctgtgtggacatagatttctgtggggagtgggaggtgctcttcaacccagtacggtgtgtataagcatcacaggcaggttgctcttagcaggaggaggccaggtgccccagcacaacactaaacaacaaagaccctaggttccaacccaaatcctgtgtccaatttctctaatccctctaaacctcagtgtctgcatcttaaaatagaggccgtcatttataatgttaggaagtggtgagcatttaagtgctccatgagtgcatggtggatctgatcatcctatctagggctagaaaaagaaagggtgatgtataaaaacacccaggagcacacgtcctcatacacgtcgttttgcatttgcccttaataacaaggacagctcaggaaacgtaatttggcagttcagccctggaagccttattcccaccttcccacctgttctttccaatagctcaccttccccagcagcggccagccctgcagtgtcactcatcattgataagaccctggaaggcgtgttctgaccccgggagcacaaacacaatagacacagagacagatgcctcccccgggagcagatgagcccagcccctcccacttcccccagaccctgccctccatcctggctggagcccaaggggccccacgcccacccaggaggaagaggctccgcttccacaccgggttccaagagacgcacccccacctcaaggcaagtgtaccagtgccaggccagagagaagctggccacttttctctcccacagtaaaagtgctatgtaagcagaaacccacccagctacttaagcgcacagacctgtctattcgggcagcgattcctcagctccacacccagcatactgaagaagttgggagttgcaggtgaaaaaaatcactcagggcttccaggtttctacaactgcttagcagacaccttactcatctgagccctcacagagcactgtgaccacaaataggccagcactttcatttccaatctacaaataaaaaatatcaggcgcagagctctttctcaaggaggcacagctaatgtcagagcccaggctctgccccaggctcagggccttcaataatcctgtgctacctaaggagcagtttttatcctgtgtggtttgtctggaaaggaacacagcccccatcccagaagggcgtgccttcatgctcacaccacagggtcacctcataggctgccatcccttttctcctctgtcagtatatacatgtttccacctgaggatcaagagaagtgtggcccagtagccggggaattgaagcaaaaagacctagatgtgaatctggtctctgctgccctgggcaagtgtgctacagtgttccaatcacagctcattcaaaatcacgagaggataatcacccctgcctggcatcgcagtgcagaggcataaaagcagcatttataaagcccgatgccatacctcccagagtgagccttatcaacagcagccatcattatgccattaaacactcaaaaggctttctttagaggagaaaggattgcatcattgattagaggttggcctgaatttgtgcaaatgttgttggtgagaaagcttggtgcctgatgactgataaacccagaatgcaatattgctaggatttttttatagtcagcctcctctttccaataaccccctgctcactcctaagccacttaggctgagcaagagggaattaacctgggcgagtccagagcggaagcctgaatggcccattcatctttcagtagctgacaatgggttgcatattactttataagctctacagtttagtgtcaatgaagcctcggtgtttttaaagctcctgttatgccatcattacttcagatatgtggaaaattcacttgcaagcataacatttttcacagtttgtgatttgtatcaggaagtgactcaacttcctctaggctccaaggcagtcatagctgggaaggggaaaactctgtctgccaagaccaagggaaccaaccagctgcatcataaaccacaccattgtggaatatatcctgctaatctggctaaagatgactgcaggacaaaatttccagggtgagagtgcccttcaagagcccagcacattgggagaaaatagactaagatcaaaaatccctatgcattctagagcaaaaccataaaagcttataccaaagatcaagggttgcaagccatctgacttctctgcagccacactggaagctacaagacataaatcaaagacataagactttctcttagctgcgtgtggtggcaggtgcctgtaatcccacctactcagaaggctgaggcatgagactcgcttgaaccagggaggtggaggctccccagcccattgcccaggctggagtgcagtgagccgagatcactccactgcactccagcctgggtgatagagtgggactctatcttaaaacaaaaaaacaaacaaacaaacaaaaactttctcaattgtgaaagtaaataatttgcaacctagaattctatacctggttgtcttactccattcaggctaccataacataatgccttagattgggtaatttataaacaactgaaattaatttctcacagtcctggaggctgtaaagtccaagatcaaggtgtcagcagattcagtgtctgacgagtgctcagtctctacttcatagacagccagcccctccctgtctatgcaaatggtggaagggacagataagctccctggggtactaatcccatttatgaaggttgagccctcatgacctcatcaccccccaaaaaccccacctcttaatactattgcactggggatttggttccaacataagaattttggggggacaaacaacattcagatcatagcaccagccagtcaattaagtaggaaggtagactgtagacattttcaaatatgtgagatctcagaaatgttccttcacttctctctctgaagaagctactggagtttgtactccatcaaattaagagaatgaatcaaagaatgtggtgagacagaatccaagaagcagaaaatccagcacaggagaggagaggagactctctggaggaactccaagtgaagatgccaggatggcagtgatgcaccagatctagacctcagtccagactggaggagtcaggggctctaggagagacttcttcaagaaaaagaaattaagagtatctggtgtggatatcttaagtaactggaggagagtttgagaataaattagtgatttgtatttgaaaagtacaaaaacacaatcatgaaccccaggaaaaacaaaaagtcatgtaagcaggaagagcaatcatagtactaccaggctcagttgtcaatgagggtgacattaccacaaaataaaaacgctgaatagggggacttcacaaaacctgcagtgtgattgtcctgaaaagaagagaggatggaagtgcagccatgcatgcctgtgtgtgtatgtgtgggtgtgcatgtatgtgtgtgtgagtgcatttgtgcgtatgtgtatgctggaggcaaggagaataagtgcgtgtgtatatataaaaggttaatatctgggctgatcaaggcctaggcctgggcctgggctgatcaaagccttactagagaaaagacctaagagtctgtcttcacacagtgtggtttccttggagacaacagtggtaagatccatgaggaaggggctgcccacatggtttgctctggaacctctgatttctagggctgccctgaagtggggagtctgcaagctggcctgctggtcttgggcctgagtgaccagaaaaatgtaaaagattgaggggaaaccaatctgtggcctctctctgtccaagtgacccaactcactgtggctctcctctgtgacggccgtgcacttcccacatggatgcaagggctgctgggctccagatggatggagatgctgggcattctaccttctctatcctgcatcctgagatggagagaagccagcctggctcagggttaaagctgattgtgtctgctgagttgcgtatcagctcccacctgtcactactgccgttctgataaggcagcagagttaatctccatttttacaatgaaagttaatagacaatgcctaagactgaaaaatcaagatgtagaaatataaatgtgtgattttgagatacgaagatgaactttatatgaagaatgagttggagataagggggttactgctaccggggagcaaaaaaaatgtggtataggcaagaaaagggagagctgctcctacaggggtgagggcacatcttgcagagggacttgactttttacacaatgtgcatgggtaaagttgaaatagtacatgtagtaaaatttttgaaagacaaaatattgcaactttaggttcatgaagcttcaagtggctttttaatatcttctaattttcagtgattgttttacacatttctcgtttttgaacaagaagcaaaaatctgtttgtaagactgaggagaaaaagatagaggtaggtcattgccaacacacgtcttctgcaggcaaatgttccaaacaaatttcaaagcctctttgtaactaaatttttctttctaagcccaaatttaattctgcagtgtgtcaaggcaaatgttttaaatgaatgttctttttccattattattgtaattattatttttaaaaatctaaataatagccaacttgaattgcgtctctattctatgccaggcactgtgctaaattcttttttttttttttttttttttttttaggaggccgttacatagttttattttgttttgggattttattttggtgtgagtgaaagaagtgtgtgcaggtgtgttggggtgtggttaatgttgaatttcccatagaatgtagagctgctctcttgggaccataacatgtatatctgagaaagcccaaaaagagggcaaacctatggcttaatattaatttttcctgcataaaggtaattgaaccatttcttgtattagtactgtttttgagccccataggccttgaattatgagtatattaagagagagagagagaagataatggatggtctagtaaaaagaagaaaatatgtaagaaaaaacattattaaaggcacaaaattaggatgcaatcaggaaaaacatatagctcacttggattatatttgtattactgacaaaacacacaatacaaaaacataagtgcataccgtacaggccatattgaatatcagaacaagtagttagacatagagccaacaaatatttcctggcaaaagtatcactggaccaatgtgaatttaactgaagcaacttctagaaatatattagcctttgtatagtcaaaaatgactacttgttttaagaaaaagtaaaataagcaaaaggatttttttttttttttgcctcacactttttttttttttattatactttaagttttagggtacatgtgcacattgtgcaggttagttacatatgtatacatgtgccatgctggtgcgctgcacccactaactcgtcatctagcattaggtatatctcccaatgctatccctcccccctcccccaaccccaccacagtccccagagtgtgatattccccttcctgtgtccatgtgatctcattgttcaattcccacctatgagtgagaatatgcggtgtttggttttttgttcttgcgatagtttactgagaatgatgatttccaatttcatccatgtccctaaaaggacatgaactcatcattttttatggctgcatagtattccatggtgtatatgtgccacattttcttaatccattctatcatttttggacatttgggttggttccaagtctttgctattgtgaataatgccgcaataaacatacgtgtgcatgtgtctttatagcagcatgatttatagtcatttggatatatacccagtaatgggatggctgggtcaaatggtatttctagttctagatccctgaggaatcgccacactgacttccacaatggttgaactagtttacagtcccaccaacagtgtaaaagtgttcctatttctccacatcctctccagcacctgttgtttcctgactttttaatgattgccattctaactggtgtgagatggtatctcgtagtggttttgatttgcatttctctgatggccagtgatggtgagcattttttcatgtgttttttggctgcataaatgtcttcttttgagaagtgtctgttcatgtccttcgcccactttttgatggggttgtttgtttttttcttgtaaatttgtttgagttcattgtagattctggatattagccctttgtcagatgagtaggttgcgaaaattttctcccattttgtaggttgcctgttcactctgatggtagtttcttttgctgtgcagaagctctttagtttaattagatcccatttgtcaattttgtcttttgttgccattgcttttggtgttttggacatgaagtccttgcccatgcctatgtcctgaatggtaatgcctaggttttcttctagggtttttatggttttaggtctaacgtttaaatctttaatccatcttgaattgatttttgtataaggtgtaaggaagggatccagtttcagcttcctacatatggctagccagttttcccagcaccatttattaaatagggaatcctttccccattgcttgtttttctcaggtttgtcaaagatcagatagttgtaggtatgtggcgttatttctgagggctctgttctgttctttatttaaatggtctcatgcaaattttcacaacagctttattaaaaaactgccttcattaccctcattttacaatgagacattccaggcccacagatataagtttatctcggcagcctcatgaacaggaggcagcaggtctggacgtagccgggacacagccaggacacagactaaacctcttagtttatgctagcctgccttcaccttatttgtattacattgacaccaggacattaatcagacatgctaagaatgaatccctgtcacctcaattgtcagccacacaagcttattgaggccaaatcataaaccagcactgagctgcttcctgcaagaaatacaagagttttaaatgggttcccggctcctgagggcttgaagacaggtgcattagtcaacaccagtcactataacaaaataccatgaactgggtggcttaaacaacagaagttcttctctcgctgtgctggagcctgaaattctgaggtcaaggtactggcagggttggtttctccttaagcctctgtctttggtttgcccttgtctatcttctccctgtgtcttcatattttctcccctccatgtgtgtctgtgtcctaatcttctccctctcctttttttgtttttttttttgttttttgtttttgtttgtttgtttttttttttgagacagagtctggttctgtcgcccaggctggagtgcagtggcataatcttggctcactgcaacttccacctcccgggttcaagtgattctcctgcctcagcctcctgagcagctgggactacaagtgcctacaaccaagcccggctaatttttgtatttttagtagagacagggtttcaccatgttggccaggctggtctcgaactcctgacctcaagtaagaacacctgttgtattggattaatacctacctgtatgatcccattttaatgtaatcacctctttaaaggacctgtctccaaatacagtcacactctgaggtatcggagctccaacatatgaacttcgggggaactaattcagcccctgacactagggctaatagttccaacggtgcagtgtacaagacgacttagatgggttcaaaagctgtgatgggaacaacagatcctgaggcccatgctgcccagtcttcagcccctgcccctaacgctcccacagtgcccatccacgatctcatttatacaggctttctgtggctgaaatggcacatgctcttggggtccaagggaccccattgcctgccactgggcatctggcaagtgcattgagtggacaaggcactggccagcctgtgtggatgacagagcaggagctgagaaagtggccccacaggtgactgctgagccaggtacccaggttagaggtctgaggcctatcagggctgtcatagaaccctggcatccccagagagctcacacagcctcaacttcccaccctggggcgagaagccccctcctgctgagctgacccttcctttccgcagctctggtccctgtctacataggttctatcattcgcgttccctgtgggccttagccacatgtaaacacatttccacaaggacagtgctcttagcccagattcccaatttcagatctaaaaaggctgctaaggacttaactgaagagccagttgaactttataaatttcctctagatttcaaagtactgagaagaaacgggcagcaagcttgtgaggccaagacataagcatttgcccttgaactggagaagtctcattgctaacggcctgtccttgtgagtgtccgcacccgcaaagtctgaacctaagaatatcttcgcctgtcggtgtccacagctgtgagcatccatccctgtgagcacccatgcctgtgatgtccacaccaaacagggtccctccctgtgagcatccatacctgtgaggcgtgcacaccacaggactctgccaaggaggcaaacttcaaagtggggctgctaaccagagcatggagatcccctgggaagctgttaaaaacatgaattctcggcaccactccagaccctctgagtcaggcactgtagggtggggtgcagctgtctgtgttcagcgcacccttcaggtcgctgatgcagctgaaatcagagggtgacgctgtcctgaaagcagctggaagatttgggtttctttctttctcgccctgactggggcaacagcacaactggctgaccagagccatggatgcctttgtggtggaacttcaactctaagcacataccgggcaaaaaagaagtttgcagggttttcctgcttacaaagcacagaaagacggtatttgatttatttatttttcattttcttttgagacagagtctcgctctgtcacccaggctggtgggcagtggcgaaatctcagctcactgcaacctccgcctcccagattcaagtgattctcctgcctcagcctcccgagtagctgggattacaggtgcgcaccaccacacccggctatttttgtatgttttaggtaaatacagggttccgccatgttagccaggctggtctcaaactcctgacctcacgtgacccgcccccctcagcctcccaaagtgcttacaggcatgacccaccatacctagcctatgtttctttatttctaacagtaaccatgcaggagctggtactattaggcccctgcagtgccagtaactgagttcatttgcccaaggccacacctgaggaggcttgaacccagaaggagggaggccaaaccccaagcttctccttctctgcggtctggtggggagcagcatgccccaaactctaaagcacacccatgcctgaggaacttgctaatgtgcagattttgatgcagtagttctggctgggcctgaggttttttgtgctgggccagctcccatgggagacccatgctgctggctgcagccctcaagagcagtggttgtgcacctggattgtggcaggtgcagagctcctggaagctttaaaagttttttgagcttaggccacacccaaaccaattaaatattggattttccagagaaaatcctacttgcccttaggctagtctgaatatctgtattataataagatttttgtttggattcctcaaaaagcagacctcgagacagggacttgattgcaaggaatctattcaggaggtaatctgggaggcacaagtgaggcatttgggaaggaaagtgagatagggaaggagaagtgtcatccaatgagcactgacaaggccgtagatgtctgccccaaggacgggaagccaggccaagcatgcatccacttagcacctctctgttggctgagtgctctgaaggcaggggctgctcaacagccaaacactgctgcaacctgcatgacatgtcagctctagaaggagcctcacaggcatcacctctttcctgtcacatccctacctatgacttaggtagtaggaagggggggtgggaggaaggggattgggaggtaggagatagggcaggtgggaggtaagacaggtgggaggaggggcggtgggaggcagagagggcaggaggcagggtgggtgggaggaaggataagttggaagaagaactggtgaaaggaagatccagtgagaggaagggccggtgggatgtagggctggtagtccactcctgccttttaagatgctaaatgattcatcaagtgcaccaagcctgggagcgaggaagccaggatataaattctgcttttctgagtctttgaccccagttagtgcacaccttacacttggactaggttcccagagacatcctgtggcccccgccctgatgccctttgttcctgtgggtgagatcacagatgcctttttctgtaaagtgcagcatcttccttggacttagtttacacaaggaaattccacctcccactgcctgagcttcctgggtggatgtttggctgggtgtgtattttctttattacacacctgcatttacagggtttctctccaggctgattgctgcccagtgtgaggttgctggtgtggccatcatttctggagagaaatcctgccacaggcagcctgccaaaaccccaggatagtgattacaataggcctggctttcagccttcaaggtagtgatgcagatggaacgtggtggccaacacctggagggccagggttggaatgatcagctgtcacagtgcctggatgaattcacctcaccatctctttggaaaacaggtgaagtgagactccagctgaacccaccaatgtccatgccctgaggaaggggctggggctagggcccacatcctctttgttgatcctcctgcttctagagtccagtctctcatatttgaggaagcaattcttacccagagaccccagctgcctttcccctcttcagagcagctctcactctataacagtgggatgagtcctgaccaaacacagactggccctcttgatgtccagagatgtctctgagtcagggcagcttcctctggggacagtcaacagcagcctccccaactcccaggcagcaagtgagcccaggagatcactgccagttgcccatggcctgcagataggatgggatgggatgggatgggatgggatgggatgggatgggaatgggatgggatgggatggaattgggcctgtgttgtcattagggaggtttaaagtggcaggctcacttcaaagccaggcctccaaataggtgtaagattgcctgtgcttccaatcatattaagccaagcacattttctagtggtttgtcagctgtaatcggtttctctgtaacattctgatagcaggagtggcccagcaggaagcttcctgtccctcgatgtcatgcacatgtggttccatggagggacccagtgtacaggccagtggtaagtcacccaagaccattgatccaacctcaatggcttcttttcagtagaagggaacatgttacacatgatcagccacagcaagcctcttgctaaagcctcagtgagctttctctgagcaggactgtggctttcttagaaactttggccttgaaacctacttgaactgaatgaggtctttctacttaaagaaaggtgaggatggcccagcacagccctggacacccagcaggcagtgtgttgcacagaaaaacagagacgttggcctgaaaaacacaacactgcaacctcacctccagtcatccaccagcccagtgactttaggccagtggctctgtccacatgtccactccttcgaatataactacaggcacatatgctgtgcagggcactgtcgtgggcaccaggatacagcagggagaaaggacaaggctactgcttccatgaacttgccttcttgcagggggagacaatcaccacaagcaaatagacaaaacaaccaaaaaaagcaacaggtaatgatgagtactgctggggtctgacacatagacccaggctgcacgatggatgaataacgtactcagacactgatattcagtgaaagagcagctagggggctggcccactcacagaaaaagttgtggcagctatgaaccctgactagctggccctgcaggcatttattcagcacagatttaaggacaaaggctttgagtcaacacacctgtgggtaattaatctgatcgccctcccccagagagaacagtcctacaaatgatcaaaggttggtcttaggaccacatgagtaaacaaaatatttagataagctcctctacattcctatgtatctacaccctaagcttttaagagaattcagctgccttcagccaaatctcatgctgaagctatgcaaatctcctggccttccaagaaggtttgtgtctatttcctataactttatgtttttaatttatcccaccaccctgactgatcccctacagagtacaatataagaaattcacattgggctggtggcggggctgcaaccaccgcaaggcagttgtggaaagcagcttcccaaagggacggtccttcttaaaacaacaataacaactgcatttaactcccaaacccacacctcattagaagattgaagtcttgctcttagcctgggcactacactgactttctttctttttctttttaagtgaaagcaaatttattaggaaagtaaaagaataaagaatgactactccacaggccaaccagcatacattgcctttctgagactcagtttcctcatttacagccttcggagagcagccacgttcaccatcaaggcttcgctatgaaaactaaagacatgatgatagagatgtggaggtctgcggacaggaggtaggtgttctgctcagcagggaagtgaggaatgaggtctgggaggtgaacttctcctgtgccggcatgtgctgtgttttccccactgaattctgattatctgatctatggctgtctggcaaagcccacaactgtggggtcctgggcaaaggttcccctgcggcacaccttcaggccactcagatgggcctctctgactgcccatactgtaaacaagaagcaaaacagcccagaggaggccactgtgtgattgtttaaaatcagttttgctcaaaatacattcttaagtatttgtaagaggatggggcagaagccttttaagcaagcagtgtgtgtgaaaacaagttaggggaggctgtttcaccaaaggaaatcctttcagagctgggaaagcattcattaggaaggcattcattaggaaggaggggttggagcctgaggacagcagaagggcctgacgttctgggagtcagaaggggcccaggacagacagaagtgtctgggaatcgggggatggtgccccacaaaggctggtaaagcgaggcctcgtgtggcgctaacatcctgcctggtgctttaggaggcctcttaggaggtggtgtttagctgtaagaaaagctttttgtcttttctttctgtgtttacattttcttcctaagagaggattgggaaaacatttccccagtctcccactgtggtgttatggtgggtggagggagagcaggaatagggacgctgtttattcttctcagctctttgccatttcctggcctacaaaccttgtgccagtgcagtcgagaaatttaggaaaacaaaactcaccaacctaaaaatgtgtacagagccccacacgtccagagataaatagctctgggcccaggggcctctgtcctgaaaagcccgttatctttccctggcatttcctaagcagtcccgccttgcaacaactgtttggagaagggacggtgaggtaagcaggaacacataaagttcattcatgggttgctttgaagcaccatgcgcttttctggtatcgagactgaataacacttatgtcagaagtaaaacattgctacagtgacagcatggttgagtgacatcatgccttcattccaaagacctgaggtgttgctcctgagcccccgctggggattgcggcccaggttcatgctctcaggctgcacacacgcactctgaaaatgtttgccattagggctgcaagccctcagtgccaccagctttacctgacatagcaactccgtggaggtaccatgaagtattcagggtaaccccccaaaatgagacacaactgcttagctggactgacttattcccaagactcagaggctgattcaataaatagagggccatgtgctcaggtttgttcttttctgctcgttccaatctctgttgtctccccctttacagctctctcacaatttccaatgtgcatctctcttttgatacatgaaacttcttgaagttttgaatggcaaactgaagaggttcagagtatgccaccccaaacttgccacgtgaacacaaagattatttggagctaaatgtatttgagattcagcagatgcagaaagaagccttcccagagtttcccttacctgactaaaagcagatacttctgagaaatgaagatggtcatagatccccatcctggggcagttttatgccatgaaggagctggaaagtcaatgtcaaaatggacctgcacaggcaaaccttactctatcagtttccctcaatgttttatcttccccgagtttgccatcctcagaagcctgaaagtttttcttttgtcttatcacttttctgtacaattattgattttttgttaaggtgctatatgagcccaagttctaaccactcctttgccttaatcgtcactgaatttcccatgtgtatgtgcaatgcacatattaataaacttctctttgtttttctcttgttacacatctgtctcttttcaatgtaatttgcgagactccagctgaagaaccaagaaagggaggtaaaaagaattattcaatatctcaatatcatgtcacctggaccattaccaatgtggaaagcaagtctctcagtattaaagggggaagtcaggttacaaaagggtaggtattttgtgagacacaaatataaagaaaggtggattcctgaatatcctcaatggttacctgagttttacaattttggtacttagcaaatactgatttctaacaattaaaaacacaaagaggtacaagtttcctaagtacccattttcaaaagatgctgtaacctatccttgtactataatgcagtacaaaagaatagccaccaatggtttgtaatccaggccaggtgacactgccagccaacagttaggccagggagcggtgtttcctctattctttcttggtgtaaatgactgcacaatcttgacctagcaagggacttgaaaaccttgtcaccattgtgtctgaaggactccacagcaggaaggtgacatgagtgacctgtgatttcagagtgtgaaatcatctatgtatccagaaccttgagaccagtggaacttgaggcagaaagtcaaatgcctttgactccaggggcctcgacaaatgtgcataaagtcagggtgcaggtcagcatgtccattcacccacagcatggctgcatttctgcagggcttggcaggtcataatctcctctcttctcccacacctcccacccaggagctcaaagcatgctgcagacacccctgataaaggccaacctggtgggtagggctctctgggccatgctgggtgaaaggatggctggctagattatgggcacacagcaaagctgagactggcccaaaatgactggcacatctgtctcctgaatgaacgctctttcacgagagactatcccacaacccaccgccatcccaagacagccaggtctctgcagaaggagggcactgaactgccctgcacaagcaatgagaactggacagacaggatgtgtgtgaagtactctgcgaagggtgtgggccgctgcagcacagcatggagtgcactttgcctggggatgtagaatgtttataaagtgctgcattgaccacccctggccctgatacaaaagtaagaatccagagccccaacatcaaggcctctcttagatgaggtcaccagggagcaaaccctcctgtggttaacacaattatcctattttcttttatttccataactcttctagattcacagttggtagtgttgaaagactatgataagtaggagctgtcactcagaggttaggtggattggatccagacacagacagatctggtggctggagcacatctgccctcatccaagaaatctggcccagaagctgtaaggcatggagatgccctcacacctcatgagggacatggaagaggatggcacagtctccaggtactggccatcagggcaactctgagctttataactacccgtgaggtgtgaggcactaaatcccattgaaaagtgttgaaacacaggctcagcctaacttgcccaaggtcacatggtaaatggtaaggctgtttagatgaaaactagctctttctgggtccagtgccaacatgaggcccctctgtgtgccatgaaggacatcctctaaagagagagacaaacaaaggcaagagtgagcaagaagaagaatagagaagagaaaatgcatacccccaaaactcacccatctgccaaccagctctataaccctatgcaggtcactcgaccattctgggatttaattaaccttctcttgaaattctgcacacagattctcagtggggctcagacatcttggatttttaatgaatgtccttgagtaattctcaccatgacgtgagtttgaaaaacacaaccataaagtgtctaaaatcctatagattataattaaatatttgtagtgccccataactccaaatgcaaataggccccacttagctatcataataagactttgcaccacattttttgggaaccgtctgtataggacaatcccatgccccagtggtctccccctttaatgaactcagggattaccagggatcttctaaatgcagattctgattcagagggtctggtgggatggaggttctgcattgctgacctgccaagccctgggaaaatgaggccatgccatgtgtggacaatacactcccaggtactgtcaatcatgctggtccagggaccccactctgagcggcaaggatgtggagcacctcttccaaaactgcctgcgaggcatggggcacagtgggcccaagcctggacccccttggtccttagggcatcggggcagccagactcagggggccagagcaacatcctttgattaccccaggtcatcacaaatacttgtcccataaatacatttttctttgtgtatcttgacatgaaggttggaagttctgcatagctctgtggttcttagcatttactggggcacagactccaatgaaagcaatgggatcccttaccctagaaggtaactcacaatataaaaagctttgccttcaatttcaagaagtccgtggattctctaaactcatgcatcattcagatgaaaactagtgctatgcctgcaatgtttccaactccattatacagttttgaaacgctgtgggcacatccgctcctcatggcccgcagtgtcccaggtctgagtctgagaatggttttctaattatggccccttcacgtcagaactttgaccctcatcatatgattccaccaaatagcagtggaaatgctcacattaactctgaaagcagtggtggcgcaaactccatgttgtcagagacaaagttgtttcaacaaaacacgcccactgcaagaaactgtaaatgctgaatttaaattgtttcgggtttatttatatttaatttataaatgtgggttggtttcatagtggtctaaggcccgtaagcaacaaggacttacatctactttgaggtttgtacagattcagataaattacaataaaataagtcaacaccaaaaaagaacaaaaattattttcccatttaaaaggaatttgcacaattccaaatttgaaaaacgctgccccataagtccccaggctatgccagaaactcaaaccctctctccctgcagatttgctgcagagcagcctcagctcagcaggctccacgcctacctaacctgaggtgctgggtctgcgccatggtgaagcggatggcgttcttatgaagcttaagggcttatgaagtggattttgcctgcgacacattccccatgttttggcgtcagaggctggcctggtgatgttgcctgtgggctgtgagctcagggcctcctgctgccctgatgccctcatgcctttcccatttacctctcagtccaccaggtatttccaccgtgggggtctcttctgtcagaaacatagatcaccacctttgacaaaaaggcaaagacagtgaaggagaggaagggagagtggaattcactctgctttccagccacgggccaggtacttaatcaacacatacacggaattaaccactatcatcccctctttacagactaggaggctgaggcttagcaggttaaatttcttaccagggtcacataaccagcgaatggaagagctgaagtgagaatgtgggtctctgcggctctttccacatggcccattgtgcctttggataatttaattcatgacagcacttcattttctaaacaaattcctgatgaatgggaaagaggaggttttgaagggaaaggaagaatattagaaatatgaggaacaaaaaccttagaacacagagaaatatctcaaggaggagaatgagtagacatagctggggtgtgtctatgggacaaagaacaacttgctcattgagaggacttgggaggttgagagagagaaaactcaccaggccaactctgctgttgtcctgattttctcgagttcccactggaaacatcagtaatacctgctgatttatttaggtgcttatataaagtttcacaagtttaaagtagtgctcagctggttatgtattccatccaaccatccagtgagtcttagaaagtggattagtcggggtctccagagagacagaacctgtaggatgtacaggcatatctaattttattgttcttgctttattatgctttgcaggcattgcattctgtacaaactgaagtgttatggcaaccctgtgttgagcaagtctatgggcgccatttttccaacagcatgtgttcacttcatgtctcgatgttacattttggtaattcttgtaatatttaaagcttttttgtcattattatatctgttacagttgtctgtggtcagtgatctttgatattactattgtaattgttttggggcaccacaaactgcacccatataagacagtaaatttaatcaataaatattgtgtatgtttgttccatcatccagctgttcccgcatctctctgtctcaccttgggcctctctattccctgaagcataacactattaaaattaagacaactagtaatcctacggtgaacctctaagtgttcaagtgaaaggaagagtcacacatttctcactttaaatcaaaagctagaaaccattaagcttagaagataggcttcttgtgccaaacagttattcgagttgtgaatgcaaaggaaaggttcttgaagaaaattaaaagtgctactccagtgaacacatgaataataagaaagtgaaacatccttactgctgaatttgagaaagttttagtggtggagttagaagatccaactagccacaacattcccttaagccaaagcctaatccagagcaaggccctctgctctaattcagtgaaggttgagagaggtaaggcagctgaagaagaaaagtttgaagctagcagagattggtttatgaagtttaaggaaagaagccacctgtaaaagccataatgtaaaagcacaagaaactgcagcaagttatcaagatctagctaagataattaatgaaggtggctaaactaaacagattttcatagatgaaacagccttctatcgcaagaagatgccagctagaactttcatagctagagaggagaagtcaatgcctggcttcaaagcttcaaaggacaagctgactttttttaggggctaatgcagctggtgactttaaattaaagccaatgctcatcttccattcccaaagtcctagggcccttaagaattatgctaaatctactctgcctgtgctctataattggaacaacaaagcctaggtaacagctcatctgtttacagcatggtttcctgaatatttgaagcccactgttgagaaatactgcacacacacacacacacacacacacacaagatttatttcaaaatattactgttcattgacaatgcagctggtcatccaaaagctctaatagagatgttcaagattaatgttgttttcacacctcctaacacaatatctgttcttcagcccatggatcaagaagtaatttcaactttcaagtcttaatatttaggaactacattttacaaggctatatctgccatagatagtgttggtcttatggaactgggcaaagtaaattgaaaacctgtaaaggattcattattctagatgccattaagaacattcatgcagcaagttatcaagggagattcatggaagaagttcagaatatcaacattcacaggaggttgaaagttgattccaagcctcatgtatgactttgagggatgcaggacttcagtggaggaagtaactgcagatgtgtggaaataacagcaacaacaacaagctagaattagaagccgagcctgaagacgtaactgaattgctgcaatctcatgataaaatttaaacagctacagagttgcttcttatgaatgagcaaaaaaaaaaaatagtttcttgagatgaaatgtattcctggtgaagatgccattgaagattgttgaaatgacagcaaagcatttagaatattacatgaacttagttgataaagcagtgacagggtttggaaggattgactccaaatttgtttttttgtttttgtgttttaatcttgtatcatagtgggttttttttaattttggtaataatattaaacttagagtaaattgcaagaatagtacaaacaacattcattcaccttttgtgcaaattcactatcgttaacattttacctcatttgcttaatcatttatgggtgtgcatgtgttctttctctctctctctctctttatatatatgtatatacacatttatacatatgcacacatatattattattttgtaaccatttgagaggaagttgtaaacattatagctctttgctcctaaatatgtcccttttttttaatttaactgtcatatacagcctcttcatcaggaatagattccatctcaacaaaccaatctttttgctcattcataagaatcaactctttatctgtttaggttttatcatgatattgcactattatatgaaaataaaaattaaaatatgtataaaggagaaaataagatcatgcataacagtccactcagagactgttagtattcccgtttagtcttctagttatttctctggatgttttaatgtgtatatttaccgcaggtttcttacaaacatatgttgcgtagcagtgacgactccaattttgagagaagttctattgtgggtaaaatgctatcaaacaacatcacatgctacagaaaaatattttgtgaaagggagagccaattgctgcagcaaactttattgctgtcttattttaagaaattgcaacagccaccccaaccttcagcaaccaccaccctgaccagtcagcagccaccaacactgaggcagatcgtctaccagcaaaaagatgatgagtcactgaaggctcaaatgatcattagcaatttttagcaataaagtattttttaattaagttatgtacattttttagatataatgctagtgcacacttaatagactacagtgtagtgtaaacataactgttatatgcactgggaaacaaaaaagtttgtgtgactcgttttattgcaatagtcactttattggggtggtatggaaccaaacccacaacatccctgaggtatgactttatatgtgcatatatatatttatatataagaggggatttatttgggggaattggctcgcccaattatggaagtcaagcagtcccatgacaggccattcgccagctggagaccatgggatgccagtaacgtggcttagttcaagcctacaggtctcagagccaggtgatggtgtccaaggctgaaggcctcggaacctgaggcagcctgtgtaagtcctggaatcccaaggcctgagagcttggagttctgatgtccaaagacaagagaagaagagtgtttctcagctcttggagacaggacgtcacctttctattccattgagggtggatcttccccactcagtccactgactctcaagccaatcccctccagaaacaccctcacagatacatccagaagtaatgcttcaccagttctctgggtaatacttaatccagtcaagctcacatctaaaagtaaccaccacaggagggtggagaatatgcagtcgtgcaccatgtaacaacattttggtcaacaacagatcacatatatgatggtagtcccaaaagattataatactatatttttactatatcttttctatgttaagatacacaaatgccattgtttacaattgtgtgtgcattcagcaccataataagctgtataggtttgtagctaggagcaaaaccataccatatagcctaggagtgtagcaggctgtcacgtaggtttgtgaagtatactctatgatgtctgcacaagaatgaaatcatctatcgatgcatttctcagaacgtatccccatcactaagtgacacacgaccgtatctgttttgctccctgctacatccttagtacctaaaccagtgcctgtaccagagcaataatcaatggcttttaaggccatctattctgtaggggcctctgggcaaatgtataaaactactcataaaatgaacaccattgtccagttgggtaaaacgtttccccaaatgctgatgctttaagacttagtgctagcgaaggaaagatcagcgatggggatgagcaggaacagaagccaacagggacagctcttgggtttccagcagttgcccaccagggcttccctggtgactgttgcttgtagggtgctccccagcaggacttatttggcttctccagatctctgccccagctctggttcctccaaacgtcgtatctccgtttgggcccagttagttcctggtctctgactgctggtgtcaccttgcaattgaaaccagtctatatcaggcttctctccaagttcagcctcagcttttcctggaagtcctcaaagttccaaactcaggctctcagcttcaggcattcctgaacccacagacaaacctgtttccatctccagacccagccgggacaacggacaatgagacctgccacagacggccacacttcttactgggtctcctgccttttacactctttctgtccctcccttaccttcagacccatcacttttgctgctgcacgtgtgtctcccactcacaatctcctgttttctggtcagttgcaataaggagcctgctgtgcaccaggaaaccatagcactgcatctgtaacaaccgcgggtcgagcaacagtcactgggctccaaggaacagacttgcgggctcttctagagtgaaatacaacagctcaatgatattaaggcacctattttggtaacccagataacttctttgctggtaacttctttcagccttgttcaggataccaaagttttccaagcacttactctgggataaatggcagctccattatttcttctgatatttaaacaagcacttgacacaccttttctactttcatttgaaatagacagccaatgttagtctattattagtttgcacatagaaaaagtcctaatattgtattaagagcaaaaatgtataaaagagggctggcatttctgatctttaattttttattaaaattttacctctcctaaataagctaatgtccattttgtttctccaattatcactttgtaacagtatcctctgtatccccagtgtctggcatcctgtatgagttaaataaatgcatttaattaattaactaattaattaatcagcttgcatttcagtaaggcaacattttgttttattttgttttgctttgctttgtcagaacaagtggaaaaactccacaagcaaaatatacctaagagataaaattaaatttaaaggctgggcacagtggctcatgtctttaatcttaacaccttgggaggctgaggcaagaggatcacttgaggccaggagtttgagaccagcctggacaacagagagagacctcatctctacaaaaagaattttttaattagccagacttagtggcacacacctgcagtcttaactattcaggaggctgaggcaggaggatcacttgagcacaggaggtcaaggctgcagtgagctatggtcacgctccagcctgggtgacagagtgagaccttgactcaaaaaaataaataaaaataataataataattattattattattattattttgagatggagccttgctctgtcgcccaggctggagtgcagtggtggcaactttggctcactgcaacctctgactcccaggtaaaattaattaattttttaaaaattaaatttcaaacaaacattgagctatgacaattcaaatgcagctttacgaatgcctctcattctgatgtcattgtctcttatgttaattagccattgagctaaaagggaatctttcaaaatttcacaaaaccctccgtgtttcccacagttccaagtcaggtctaacacctaggtaaacacaaggaatgttcaaataggtatatgcttaaaatggaaataaaaggcaatttcccaagtgaaagtcttcagtttcttaacaaaggaaaatggcccctttcatttgcactggttgtgagacctttctttagtcagaaaacgagtttgcaccagtgtggcccatttaaaagaatggcccacaacatgacattttttatttaaaaaaaaaaaaaacacaggagtgtctgggcatggtggtcatatctctagtcctagtgctttggaaggttcaagtgaaaagattgcttgagcccaggagttcgaggcttcccagcctggacaacaagaataaagccctgtctcaaaacaaacaaacaaaaaaaaattcaggagttacgggtctacaagtgatttagggaaagaaactgactcacttccttagatcccagagaaatacagctgtgtccaccaattctaaactgaaattgatttgaagaaagtattagaaaacagctccataaccagaaagaaagaaaaagaaggaaggaaggagggagggaggcagggaaggaagggaggaagggaggaacggaggaagggaagaagggaggaagggaagggaagagaagagaagggaagggaagggaagagaagggaagggaagaagaaagcatttgcctcctctctttggactttatcactgaagattcatattggaaaaaataaatttaaaaattcagtgaattctctaagatttagatattcttagtgtttatgttttttatatccagagaacagagttgaattttgtaaaaacaaaggctttaattatggaggcagcattgtactattcaaagaaaacataataacatagtgaaagttttgttataaaattcctgaaggaaaaatgccttactctggattattacagaatagatactgggacaaggatctggggacaagtaggttattagagacaatccccagaaacaggagggggaggtgatcctgggcagggaggacacccaatgaagatacttccatgtggagctaacactgtgggtagccgggctgggtcccaccaggactacttggggcatctactcagcaaccccatcccttcctcctggctacagaaaaaaggggttaactccactcagcctctatccctggcaggcaggcagacaggtccccaggctgaaagccacaggatgccctaagtgggtagagagctgtgctctggggacttccagtgtggtccgtggggataccggcattgacagcatctgctacaaaaataactctgttattgttggtgaatctgcaattccctattgccagccctgctttcccccctggaatcctttgtttttatcctttgttttattggctgcacgagatttcttagaaacatcaatagggcgttactgctgaactgacatcctgacctgcacctgctggtctttagtaaccactatttccttcttccctctccccgtgtcacgcctaggcctcctgcaagccagtgttggagtggggtgggaggagagcccaggccctttgggaggcaatgtgccctgccgcagcccacacctgagcggacacccctggtggcctctccctcctggttgcaggcacagaaaatgatgaaggcagccctgttggatacacttgagttgctgcagaggagagatggtgtggagcccgccttccataggatgtagagcccttgagggaaagaagccatgagggagtggtaacgacaatggaactttgcaggaaattgtgagtcttcctcaaggtgagagtttcagggaaatctagatcctttccctgtggttgtccaggccaccacaagcccttcagaagttaagcattaataacagtccaagtccacggacctggcaacttggtgatggcctagcggttccagctttctgggcaagggagggcaggcaccttgctgcctgcagttggtgtctggaatggcttccgggatagatttccggagcagcccctctcacttccatgaggaccttttaggtcctctaagagccttacctcagactctcatcccagggaccccactttgggcaccctaggtttagaaaagacgacttaggatgggctccccagggcctcagcaaccaccttagaattgacggagatgagtttcccctgagtggccatttatttatttttgtttgtttgtttttcaacttttattttaagttctgcagtacctgtgcaggatgtgcaggcttgttacacaggtaagcatgtgccataatggtttgctgcacagatcatctcatcacttaggtattaagctcagcatccattagctattcttcttgatgctctccctcccccacccccatcccgacaggcccagtgtgtgttgatccctccccctgatgtgtctatcacatgttctcatcatccagctcccacttatgagtgagaacatgtggtgtttggttttctgttcctgcattagtttgctgaggataatggcttccaattctattcatgtgcctgcaaaggacatgatagcattcctttttatggctgcatagtattccatggtgcgatgtaccacatttttttatccagtctatcatttatgggcatttaagtggattccatgtccttgctattgaatagtgctgcaataaatgtatttgagcatgtacctttataatagaatgattcacattcctttgggtatatacccagtaatgggattgctgggtcaaatggtatttctgactctaggtctttgaggaatcactgcactgtcttccacaatggttgaactaatttacactcccactaacagtgtataagtgcttccttttctccacaacctcaccagcatctgttgttttttgactttttaataattgccattctgactggtgtgagatggtacctcattgtgattttggtttacatttctctaatgatcagtaatgctgagctttttttcatgttttttgtccacatgtatgtcttcttttgagaagtttctgtttatgtcctctgcccacatttttaatggggttgtttatttttttcttgtaaatttgtttaagttccttgtagattccggatattagactttgtcagatgggtagattgcaaaaactttctcccattctgtagattgtctgttcactctgatggtggtttcttttgctgtgcagagttctttagtttaattagaccccatttgtcaagttttgcttttgttgcaattactttcagcattttcgtcatgaaatctttgcctgtgcctttgtcctgaatagtattgcctagattttctcctagggttttatagtttgggggtttacacttaagtctttaatccatgttgagttgatttttgtgtaaggtgtaaggaaggggtccagtttcaatttcctgcatatggctagccagttctcccagcgccatttattaaatagggaatcctttccccacagcttgtttttgtcagctttgttgaagatcagatggttgtaagtgtgtggtcctatttctgagttctctattctgtcccatttgtctatgtgtctgttttggtaccagtgccatgctgttttggctaccggaggcttgtagtctatgtatctgttttggtaccagtaccatgctgttttggtactggttactgtagccttgtagtatagcctgaagccaggtactatgatgcctctagcttcattctttttgcttagaactgtcctggctattcagggtcttttttggttctatatgaactttaaaatatttttttctaattctgggaacaatgtcaatggtagcttaaggaaacagcattgaagctataaatgactttgggtagtatggccattttcatgatattggttcttcctatgcatgagcatggaatgtttttccatttgtttgtgtcctccaagtagctatttctgtgagcatttcctcacctggtcccaggatctgtgaggggcccactaggttctggcttcatctaaaccaccagctcttggccaccctcactgggaagagatacacaactggtcagggctcaccagcgatggccttgctgttttcctgtgtggactcagcatgtttgccagacaccacagaattaaacccaccccgctggcaggaaaggaaaaaactccaggctgtgcaccaccacacagagtgtcttgcacacatacagccacactacacattttaaaattaatgaatgcatgagtcaatagattaaagtgattaaatagttgttagtaacaaagaacctttaaccagtcacatcaatttgcatctgtctctgaaatgggacttttcttaaatgtgtatgacatgatagccttgggagattgttatgtctaaccacaatagaaagagttttcttccagcaaggcacagtggctcctactatggaatcagctactcaggagctgaggtaggaggctcagttgagcccaggagttcaaggctgcagtgagctgtgatcacaccactgcactctagtgtgggtgacagaatgaggccctgtatctaaaaataaataaatattaaaaaattaaaaagaattttattttagaaagggtataattaagtggatattagttagaactctttaagatacaaatgacaaatgctcagtaaaaatttaaggaaaaagggagagaatgtattggctctttcaatgacaagtccatggggcagacctggggatcatcggatgccctctgtcttttccaattgatccttcaaaaggactctggctgggcctgcctgagtcactggtccactgcagcactgatacgagtgccacagtgggatctgttaccggactggcagcgttggtcatgcaccttctgtgcaaggagccggcagggctcctgggtggcagcaccgcctggagttggggagggagacagaacacaggtgcccagccctataatagcccgcaccagggagcagcgttgagccaggccccatgtttatctaatgacaaaatcaggggctcattcagcagggtcattgctttcaaagtgtgatgtatttccaaaggaacaaagatttagaggattttaaagaacaaatgttcaaaaagatgtcagcagaatgtcaatacgatgggcatggagtttacctagatggagggagactgacaaggcccatcttttcagaaatagccccaccagctgctaaaatgcagagggtggctgtcactgccagggttagtatcaccaccagcgttagtgaggtgaaggaagccagggacagtctcagtgccattggaagaaattgcccgcagtgaaccctctcccacctccgcgcacagcctcctcatctcaaggaaaaccacgactcccagacctctctttacagccaccatcgcctggaaaaccagcggtggccaccactgaatatctgaccacggagaagcaaggctggcgccatgcatcagaaaatagtcatttattttaccaactagatttaaccccctaaatctgcctcctgagaggcaggttggtttaggtcattgtgaagaaaactgaagagagaataggaagtacagaaaaatgggaaacacgttgctgggaattacagagcgttgactctactccagtgagtctgtttctaggtgcagctttttttttggtgaaagatcaccccgtgcccatgccaaactgcaatcgaagaatgccattttaaagggacagaaaattattagcctcacaccacctaacatgtctaagtctttcattcagagcagtgggctttgtgtcgagaacacagcgtaggggacaacagtgctatgagttaagagatgctttcttagtgtggcctccccagaaggtgcccctgagacagagattcctgagcaataattaactaagcgaggactccccggggaaactggtgcactgtgtggaagagagacagatcattttaggccacaccatacagggaataaagtggaagttccatctcagagttgtcaggccttggggcccaggagctggcctgtctactgccacagccaggtgctgcgtaggggctgtagatggggtgggggcccgggaacaaaaatgcgcagacttcaagtccgtgctagccagcagagcaaggctagtcacctgaaggcagcagcctgacaagagcagccacgcaggcagagggctctacagcaacaggagccagtagctagcagggagccccaatcctagagggatgcaggcacctcagcaacaggggctggcagccagcagggagcccccatcctagaggggtcgcaggcacctgctgagtaccagcaccactcccagaggcagcacatggctttgtgtagaccttgctcctgaggaagagttttgttggatcaaaagaccggagaactgtgccgctccccactgtggtactggagcccctggtcagtagaagagggataaagacagcagcaccccatgtgtcagacccatccagcaaaccccagtagggaaaagccttctggcctaggatcccggagctgaagctcgctcgcaggacacctaagggactcaccctcaaatccctcttgccaccaacgcaacagagaatatggcaatccagccttgtctgggagtctttcctaggaaaagcagcttggtgaggaggaaagggtaggggccctggcctcagatctgcactacactgaatggtgtaaactctccaagctgcatttcacttgtgagtaaatagagatgatgcccctgcccctgcaggaatgtggcagcaaacagagacacacatgtaaatcatccagcccacaggaaagagtgttatgatcttcagtcctggccaccactctctcatcctgagcgggaccccggatgccaggatcgtggaccagtgacataacaggactgcacctggcacctctgggagggaggtcattctcctggattctggaagaacccccagacctcccagtgcccctcacaggccctctggccactccgcgctcccccaagggtcttcagctgggactgattccagggatccgccaggccttacaagttcctctagggtcttggtctactccctttgttttgttgttgttgttcttgttgttgttcttgttgttgccgttcttgttgttgtttgagacagagtctcgctctgtcacccaggctagaatgcagtagcatgatctcagctcactgctacctccacctctcaggttcaagcaattatcctgcctcagcctcccaagtagctgggactacaggcacacaccatcatgcccagctaatttttgtatttttagtagagacggggtttcaccatgttggccaggttagtctcaaactcctgacctccggtgatccacccgcctcaacctcccaaagtgctgggattacaggcatgaaccaccatgcccagccggtctgctccatttgatcagcgtccttttgttgcactgattgtcacaatggttgtcactcaggttacagctgaagaatagcaaagctctgtatgtagaagagaaagtgagaatttcctggactcctagggctgggagggacttgcccaggtaacagtttccagcagtgttcgtagtagcaattggctgagctgtgctgcagaaacaaactcccccaacattgcaggggcttacacggagggtctttattttctgctcactcagaggctgtcacatatccagcagttgtttggggcgactgtccctggtgcagggacctggcaattcagggaaagtgttttggtgtctccgccatctccacatgaggcttctctagggctgctacagctggggaaagagaaggggagggccaagcgggggttccactgcctcagcctaactccccaacatccacgtgccctcacgtgctccaagggggctgacaggcattgtctcccccacatctaggaagaaaaggagcttcagatgttgctaagcacttgtaaagtctcatcagggagtggaatacttgtttttcccaaatagaactttacatagaactccaaactgagtgcttctcttttttaagagagagggaaatttccctggtaccccctcttcccatcccatccttgaaggaccctcctcagccctttgtagcaatggaacagagggcactgtccaaggatgtggtccaaatcccacccattcgtacacacttggaaaaacccggcaaagcttggggtctcctggccctggcaggggcaggccaggaacgagtcccatgacttgcctgctctaggactgacccatagcacttttaaaagagagcagagttgataaaatcatcccccgtcatggacttcaaataacatactatgcaatatgattacataattctgtttaaattttgatgcagggtgaggaaagagaatattgcaatacagccacatcttggaaaggctttgaagtcctcattaatacccaagaaagtttagaacttcatctgatattagcaaatgtcagaggaaagtgcttgataacaagggtcaggatgttaagtaaacagaaaggaattaatctccattcattaagaggatgctgaagtgacctttaaactaaatcaaagccgtgccgttaaagaaaaggaatgcatcatggagccccaccaccacagctttcccctcatccccttgccaattccagcctgagggacattcaccctcttcatcccttctctggcagaagacagggtgcttggaagacagggtgcgtgtccagagaaaatcaagcatctgtgcaggctgggccactcagtaataaacgctcctctctaacctctcccaggagctccctcttgctggaaaagccttaaatacattgggtgttccattgggtgtgccctttttcaatcgctttacactccaaactggcttctggaaacctctgcctgcacataacatcctgctgttttggagaaaagcagaggtaactaccttgaatttccttgactctcttccctcaatgtaaaggtctctacagcttcccttccacccctcctgtcactctcccagggcccctcttcgcacacatccccgccccttcccacacatctctgtaggcgtcagagccacatctcagactccaggggtcccaacccaaacccatggcatctgcttctggagaaggaaacttcatttcttacagcccctctctctcagtcccacttgcggctgcactgtgcccacctgaccttgaccagagtcctgtcccgctcctgccacttcctctccttgacccaggacttcctgggctgtagcagcctcctatctggtctcctggtccccagcctcaacttcttccaaccactgatgctagatccgttcctcaaagcactgctcacatggaacctcttcccttttaagacctcacacttccctggatgctccggaacctccctgcctccacagaggcagctgtgcccgtccttgtcctacaaatggccaccagcccctgctccccacaccgtgagaacctgccattctctgacctgccacactgaacagtccctctcaatgctgcaggtctcacagcacttttgcccacccctccctgcgggcactgtgccttgtgttgtactttacagatgttcctttcatccccctttccctcctggtagacggagattgtgtcctcataatcttaactctcacagaggatgaagttgctaaacacacacacgcacatacacacaaaaactcatacacacacataaacacacacagacatgaacacacatacatatatacacataaacacatacacagacacatgagcacacattatatacacacatgcacatgcacacatacacaaatacacacacgtgcacatacacatacacacccacacccacataccctcacacacaacctcaccacaccacaccccgtagccctgcatgtggagaagacccatgcaatgtgtttctgaagacgaaagaaacaaagctaactggagaattacgtggcaggaaatgatggatttcgcacagtctgtgaaacacgctctcaagagctcttctccccagtgggtacagaccggacacatgttctactgagctactccaaaacatgtaacatacacacaggatttggaagactgtatgaaatatgaaagtgaactgtttcattttattgagtccctgtcgacatgatcatattttagatgtatcaggttaaaaatatatattactaaaattaacttcagctctttttttccctgttttaaatgtggtttaaaaagtaaaatcacacaaatggctcccactgcatttctgtggacagtgctgctctcacaccaggagccgacaggctgaggcccgtggcgggagcccctgccggagcccagccctgcccgcccacttgcctaccacctgtgcatgcacggtgtggcagagctgaggactacaggctgaggccctctggcaagcaaatcagaaaatacttactacctggctttttaaaaaacagctagctgagaatacatggacaaaggaaggggaacatcacacactggggactgttgtggggtcgggggagcggggagggatagcattaggagatatacctaatgctaaatgacgagttaatgggtgcagcacaccaacatggcacatgcatacatatgtaacaaacctgcatgttgtgcacatgtaccctaaaacttaaagtataataataataaaatttaaaaaaaaaccagctagctgggcacagtggcttacttccagttggcctgtaattccaacactttgggaggtcaaggtgggtggatcgcttgaggacaggagttcaaggcaacatagggagcacccccgccccccgtatctacaaatgtttacaaattagccagaggccatgcacggtggctcatacctgtaatcttagcacttttcaaggtggaggcaggcagattgcttgagcccaggagtttgagatcagcctgggcaacatggcgaaaacttgtctctacaaaaaatacaaaaaaattagctgggtgtggtgacacctgtagtcccagctacttgggaggctgaggtgggaggatcacttgagcccagggaggccaaggctatagtgagccgtgattgtaccattgcactgcagcctgggcaacagagggagaccctaactcagaaaaaaaaaaaaagccagatgtggtggtatgttcctgtagtcctagctactcagaaagctgaggcaggaggatcacttgagcctaggagttcaaggccaccatgatggtgtcactgcactccagcctgggtgacagagtgagattctgtctctaaaatgaagaaaagaaacagctgaccccagctctgagttatacagtgtgggcgagtggatgggcaagctgcttttcgggaacattgtaaaatttcatctatttataatccaggtgtctgtgataaattcaattctagttgaacagaaaactctttgttgaaaatttgtgttaaaagttgttaagaattgccttttgtagtccaaaagtatgttccttcaaagctcaattttcaaatgcaataataattcaattactggattatcattgttacaaagtatcagatcctgggtagactctagctctcagcttgagcgtgtttgatttcacttttcaccacatttttggtaacagggaggagaactgacatttagtggcacctcccacatggtgggccttgacctaccagggtgcatgtatattcttccatgtcatctaattcctatttttttgaagttgagtggtttgagttaatctgggtttttcctataaaggagcaaaccctttggcttatactctggtgcaatgagattctagaatgagttttgtatgaatggaggaacatgtctggaagcttctcctaggcctcttcccagacaagagcactggaattagccaacatggatcccccatccaagaagatcaggaaccttcctgccaacaggttcttcgatagcaggcagcttgtctacctccacagatggagagcagtcaggttgctgttgatcctcccagcttctaccagggctcaagcaagtgttgccaggaactccgagaagcatggaaaaggaaagcacagagtacgccctgcttcagttctcttgctcagcattaagggaacgtaatttggactgggaacggagggccagtgacacatgaccttctgaaacacccaattccagaaagtccttggcaagacacagcacagctcactaagctctgctgcacactattgtttagctaaggaagccatctgttcctaaggccggggaacggacactgacatgaaagtgacaacccatccaaacaatctggggcactctggaaacacactagtgtgcttagcccagccacttgacctcctgtctctgaatgatgagagggaaatgcttgtcaggatcttttactgcatcttcagcacatttctcctccatgcaacttgttcctgacccacagttagagttagctgtgacttaccaaaaaagctaggtggctctttggccaatgtccagggagtatgggaaaggaggaatagatggtgtccaaggaataaagcagcctggggcactgtgccctgccgtcccctccttgctggttttgaagcctgctctagccccactcaggtgccttccagcagctcagactcaccaagtggggcgggacctgactcctccccatcccaccactgcagctgccctacaatcgcctacaactcagtgaatggcaatttcatcatcgctgaagcttggagcaatcttgaatcttctttctctggagccccacaccggatgccttcaccagccccaccctcacctgccagggctctcagtgcctcctgactggtcccaaacttgagaagtctaattcctcccagccgtctggaccatcctcttacacttcagttggatcctgttactccccactcagagcctgcaagggtgccatttgtccctccaaggagaagcctcagtccttgccaaaagatgtggccccgttgaccctctgcttcacctccttgctctctccttccccctccaatcccacatcagcctctgttggttttcagatcgtgcttgggcacgattctacctcgggtcctttgccgggctacagtgatctccaggatgggctaccccacttcctccagctctcaaatgtgactccctccaggaggcctttcctgcccacctcttgccaaacagcagccacccaaacctctatgactcctgggccaccagtactttctccacagccttcgtcacctgcaggcacggtagatatccatgcatgtgccatctgtctctccaccccacctccactaacgtggacgctccgagagggagggcctgccacagctttggtcactgctgtatacctgaggcctggagtggggcccagcagacgtgagtatctgtcaatgaatgtagagagaaacattcaacaagacattctccccatgatgtcaaagggtgtaacctttctgctgaggaggtttgcaccagagggacttaaagtctctctgaaattatgtacagagcccacaaaagaggcatgatttgcctttttaaatgtcatctctttaaaacaaacaaaaagctgcctcatctgaaattgaggccaatatcaagtttaaggagattccaccactattgatgagatgctgcttattatgtgtgaggtatagtgtcatgtgctgtgagtacagaccaggaaaggaagggtttccgaaactctctcctgctggcctcagggctgcttggctgtcttatgcccagaaacttgaatatggagaagaaggctaatttctttattttctttttaattttattttgtttatgttttaataggtgatacatttatatggcataacgctcaaaaagttcaaaaagctacacagtgcaaactaagtctccttccagcttgccagccacccagttagctccctggagggaaaaagggcaacttgttccttgtctatccttccagatacgtctatcaaaataccagatctgagaacatcgaggccagttgcagaccaaaccactccttgtgtgtctttacgtaaagccaccatgaatgtgaagagttcctttgcgtgtggtggccagcaacctgccatgcttcggcacccactttgaatgcaggcttagctttctcctgctagaggcagggctcagtcaccctagttctataccatgcccaaatggctcaagccagcggctagagctaagaacttagagacatctcttccacctaacagatggggctcacgcttttctgctgcttcctatacatgcaccatttaggcattttcccacaaactcacagtgacctacaccctagcccccagtatgttctccagagaactccctctctcctcccccactggctgtgctcctgacccccatgtgtgtggcctccagcagtgccgtgtatgcccagggcccataagtaataaaacctagaggccaggcacagtggcttacgcctgtaatcccagcactttaggaggccaaggtgggtggatcactgtgaggtcaggaattcgagaccaccctggccaatatggcgaaaccctatccctactaaaaatacaaaatttagccagccatggtggcacatgcctgtaattccagctacacaggaggctgaggcatgagaatcgcttgaacccaggaggtggatgttgcggtgagtggagatcacaccattgcactccagcctgggcaacaagagcgaaactgtctgtctcaaaaaaaaaaaaaaaagtaataaaacctttatttctgtctgtgtctcttctaatctttgggggggtgctctccaccttaaagattctaaatcaaagcacacaccgtgtgcccccacggggtgctgcagctgtgccaggatctgtagcctaactctgctgtctttattaacaacactgagccccctatgcttacggagccccctatgcttacgcacccccaggtgaagggcggaactggtctttgttgaaggcacctgtggaggctgatcctacccaagggctgtgcaaaacatccacatagacaacttctatctgcatggaaatgctatatcctctagctagcatagaacaagagaagtctggggaaggaatgaactgtggaaggccagggtcaggggaaaaaaatgcttccacccacctagagtgcaagccgagcccctcagaccatccctgcactggctcagtggaaggcgccccctcagacagccaggcctggtttcatctacagcgtcatgtacgttcctgcttctgtttatctttggctgagagttaatcaagtgtttactaacccaatggcagagaacctcagaggaaaacttttcaaaagaacaaagtgtccaccagacaagggaattccaaggagaacaaacacatgggacacagcagcctgtgtggacccgccacatctgtgtttaatgaatgccttttcctgctgtgaacaaatatagatggcttagagggtttaagtcaggggctaatgagctggcatcgttgtaagtgctcagacacccactgaactaagcagaggggagactgtgcaagacacacactcccccctcgccattacagacagacttggggatgctggctggacaaggtggaccacccatgtggaaggattcaagtaccaaatgctcgtgcatttgacatcacccctagagaatcttggaaaggtcatgacgcttgcagagaagggacacgaagtagctgaaatgccttctccacttggagaggttgcctgactctaaggcgaactggagagaggctggtatgagctgggaacacagacaagagcaaggtctgcaagcctgccagaaaaatagagccatttctccagtgctgggctgagaagactggcaagccagctcggcatggccgaagacacattccgcaggggcctgtcactggtcatggctcatccgtagtcacggaggccacactgtgcaggggactacagcatacggaggagacaaagctggctgagctgtgactgctgtcctcaaggcagtctgatgctgattagggagacagcctcgaatacacacacacgcacatacacacaggcatacacacagaggcacgcacaaatatgtgcacacacaggcacacacatgcacatgcacatccctacacacaagctagaatcaaaagatgctacatgctagaagaaaacacaggagaaatggaagatttcataggacacaaaaacatagagcctcccaggggctacaggcagggagtgctgggctcccacagcaaagcctaggaaggggaggctccctggaccttgcaaggaggattcaggtgttgaggccgcagacacagaggtgagtcccttggcaccagattgatgcagtggtagcagcatccagaggccagccaggctctggagaaagaacaatttattcttttatgagtaggtagcttttggaagcacatgccaggaaaaagacagtaataatagtctgcagcgaaacccacttgataactccctgagaaatacgatgtggtcacatgcaatgtagagaacgctagggagctgttagacatgtgggctccaagcagacagttggccgcacttctggatgcttcccctgccagggcgacacacgccctggaaatgacaaagctagagctcaggtattccatgagcaggaagcagctcagcaggcattctccagggagctcctgctctcctcagcaggcatgccccagggagctcctgctctcctcagcaggcatgccccagggagctcctgctctcctcagcaggcatgctccagggagctcctgctctcctctctgtgagaagacccatgctctgccctgtgcttccctccctcatgactactgggcacccactgacaatctggagttgggggagactggcccctcccactgtgtctttccttctgtgtaagccacagtcctcagaatcaaaactacctgcctgatcactgtttcaaatggtttctgtcactttctcagacacgttttcatgaccaaagccctatcttgaatgccaactgcctttcattcacctgatgtaagtgtataagtcgtccctaaattacacacaatgcttacaatgtacttaaacatacaacctactggagtcataaaggccagtcttgataattcacagaatctccagccctggccacctaggctttgtgatcagaggggtaggatgaacgcacggacagaactcctccaacagccaggtctgcaatttggaatcccctaattccaaataacagatccccaggcccccaccagcccaagcaagatttccaggaggagaccctgtgccctgcgtgttcaacagcagcccaggagactgtcgtcaccagagaagttaggaggacatagccccatgttccatccctcagtgcccttcctctcagcccaccctgctttgtttctgattcaagagtgctagccccacatgcaggtgagactggtccaaatcccagctcccctgcccacaggctgtgtggtctcagtcagtcacactcaaccccggtgagcctcagcctctacatctgcgaagcagaaagagcaagccatcccttggcctactttgatggccggggcacagcctggctgcactgcccatggtgagcagtaaatagacagtaaggctgctgctgacgatggtggtaatggtgatgtcagaatcaataggctgagaagagaagaaatcaagccccaccacaaggccatgcctgggatcatgtctgcttgaccacagggcccatgggatttcatgtgcagcccaggagctggctggctgtcaggggataaaagaaagaagctaccagagctgccagccatgtgcacagtgctgctgttgttagaaataacagcacccagtaacataagctgctgctcacaggaacttctttttcaatcttacacagtcagagcactgtcaagtgtcactgctgaaatgtatgggagttgacccacactggaccttggcatcctaaaaaactcagaattgatgtcctcagcctgatatttaattgttctctcaaaaccagggagggtcacagtcatctgcagcaatgtaaacaccaccccaaacttggtagcgaaaaacgactcccgcaactctggggtgaccgggctcagctgggcggttctcactcacgggctctcaggagatctccatcagatggtgtctggagctggagttgtctggaggcaccaccaggctgaacacccaagacggctgttatgggtcaaagtgtgcctaccacccaaaaaagtcatatgttgaagacctaaccttcagtatttaagaatgtgagcttatttggaaattgggctattgcagatataattagttaagatggggtcatacttaagtagggtgggccctgatacactggtgtcctaataaaaaggggaatagtgggtttttttaggagtgggggtttaataggcagaagagaagagaaagagaaacagctctctctctagagagaggaggggtttccaagtggaaaagaccggctggcagatgcgccagattttgtagtccagcttgaggaggcggtgtctgatttacataaggctcacagattagttccatcaggtgtgacatttacatagcatgtggggaaggctggtcaccccaccctaatcttattttggggcaaggaccttctgttcctagaaaaccacaaggatgccttcccttgagctatacctccggttactatgacattccctgatcttgccaaacaagatcacttccctgaactgtaaaacttcccacacactgcatacacagaggggataagagatatgatggccgctgacaggacaggaggaaattatgatacaaaatttggagatcccgttgccgacacctcatcgggcagtgggaggcgggggtcagtccagaagcctttggataacaacggtaggaggtagccccagccagaaatcttcagttgccccaggacttctttcagccccacacaatagctaagtcctctgtgaaagaaagctggctcaaacatggcctatatacccagcaatcctgggtgctgggagtttctccatgttctccccaataagcctgtcccccaagtcttataaggttggcagccatgctattgtttttaaatggctgaaggggaccccgtatttggtttgatttggttctaaaatggaggctgagagcctcgaaatgcaaggacagagttggagtctgcccctctactcactgtttcgatgagtattgtaccttggtaccccggatgaggtccccagtatgaagcagctacattgtctggggtatataccttggggttcattgtcttgcaccaggaaaatttcagacacgaacacacacgaggagtttaggagtgaaggtttaacaggcagaagagaagagaaagagaaacagctctctctctctccagagagaggggtctccgagcagaaaagacccaaaaagggcaaatgtaaacacagagacatacacagcagaacgccatgtgaaggtgaacgcagaggtgggagtgatgtggtgtctacaaaccaaggaacaccaaagacggcggcaaacaccagaagccagggagatgcatggaacagactctctccaagccctcagaaggagccagctccacggcacctggatctcggacttcggcccccagagatgatacatttctattgtctgaaccacccagaacaggtagcatttagggcagccctagtggattggctgagtgtctttcttatgtggctcaccgtgggagctcagccagggctcccgaagcaaggacctgcacgcagcctccctatgggactgagcgactcacagtgtggccaggtggaagagtgaacgtcccgagagggaacatctggagagggagcagggtggagactgtgaagcttcttggcccaccttggcagtcctgcaacatctctctgctgcagtctgctggtcaagtgggtcgctatggccagcccagactcaaggggaggggactgaggtaccacctctcagtggacagagcagcaaagggttttcagccctctttatcagccgcaagcagctactaacaaatggacattacatcgacgtgtgcatctgtgctgggaagtgtcctattggcaggagacgtggagggagagcaaggtcagaggagatccaaggtatctactcctaccatgaggagagtctgtgcatttgggacctatatgaggctgtcccccagggggacagagaaacaggggcagctattttaagagaaaggtccagtgacatgaaccgcagtagaatatattccatgaactaaaatgcagccacatggaaacatcattaactaacaatgggccacagagctagacatggtggcccacacctgtggtcccagctactttggaggccaaggcgggaggatcacttgagcccaggaagtcaagactacagtgagccatgatcgcacctctgcactccagcatgagtgacagagagagaccccatttccaaaaaataatgtgccaccgagaccaaactctcaatagtatgagcatgaatcagggatttccatacaaaacactaccaaacgtgagggcacttcctgagtctgaagtctcgtgttgcatccatgagcacaggtgctcttcatgctgcgttctcggtggagagtagggaggtgggcttacctcctccccctccctgccgccccccgcccccactccctaccaccattcccccgcctactccagctgcttgtcctgaaccagggcatcacagatccaggcagtgctgcctcaccagggcctgtttgtcttggagccaatgggctggggtgaggacttgctgggccagggcctctgtgatgtgctagggaggatgtggctctggggctcagtcttccagtagacatcaaagcccccattctccctgctgacagggttgtagggaaagcacactgcagagagctaaacaaatacaggggcggcagccaacagcagagagacaaaattcctgcggcacctctgatacttcctcctacctctcttcccagtagtccttataaaggaaagtagtgtgtacagggtggcgatgatggagaggttgaaggaaagtagtgtgtacagtgtggcgatgatggagaggttgaaggaaagtagtgtgtacagtgtggcgatgatggagaggttgaaggagaagggactgacgatagcttctcagggtgcttccgcaagtccgagcaggagtcgctgctaagaccccagggtccccggcaaggagccctctctgccggcttctgcaacacaagccccagaagctgagcatcaacatttccaaacttctttctaggtgctgacttgtggctgcattctcaaaattatacactgcatgtgccaggctgcctgcacatctgacttgttttcaaatgacaaagaattcagtgaccaatcaggaacctgttgtccttctccagggagtgggtaggggcctcacattctagtgcacctggcgcagaaatgactggtgatgggaaagctgatctggacaagtttgacccaggaaggcagtgatgggagcagcctctacgtaacctaacttgagctcagactctctctttctctttctctctctctctctctctctctctctctctctgtctgtctgtctctctctcattctctctctccagaagagcagtgggaggccttcagcccctttggctctgctgaggcgttcacactgaggccccactcacccaatatgactgagcatggtgggggactacagccaagccatctgcccaaggcagcaccccaccagtgagcagcctgtgcaccagggtccccccgcggggctggctgaggatttctcagcatttcctacccatccctcatccttcaccctctccttgtcccagggtcaggctacacagcatggttccccagcagaccttccacaagtcacatttcatcttggcatctgcctcttgaaccaatgcatcatccaaatttaccttgagcttctctaatgataagaaactcaccaggaagcctgttctgctttgatgtgatttaaagttttctttctttctttctcactctttctttctttccctctctctttctctctcccttccttccttctttctctctctctctctttctttttctttctttctttcttgcttgcttgctttctctctctctctctctctttctttctttctttcttctttttttcagatggagtcttgctctgtcacccaggctggattgcagtggtgcagtctcagctcactgcaacctctgccttctgggttcaagcaattcttgtgactcagcctcccgagtgcctgggattacaggcacgtgccaccacacccggctaatttttgtatttttagtagagacggggtttcactatattggccaggttggtctcgaactcctatcttcaagtgatctgcctgcttcagcctcccaaagtgctgggattacaggcgtgagccaccgtgcctggcctaaagttatttcttactgtatcattgtgatgctggcagaaaacagatttctactcagagggttcagatgggaacctttaatggaggggcacttttccaggtgtgaaagagacaaccaggatgacgagcacccgggatgggcaatgcctgggagctgtcaaagccttacgctgcagggcagggctgcttggcgttactgcagcctagagaggtggggccatgtgggtgcaggtgctgtcccccagggtctgaggcagggaaagaagggccacactgtcccctctccctgctggcctgctccccctgttcttcgcactgactgtgcctcatggggaaggcagtctgcaggagcactgggcagagacagtgccctggtgtacagggacagccagagtgagaaaagcatcccgcctccccaacagcatcctgcctctgcaaaatcatctcgcttccccaacagcatcccacctccccgacagcatcccacctccccaatggcatcccgcctccctgacagcatcccgcctccccgacggcatccaccctccccgacggcatcccgcctccccgacggcatcccgccttcccaatggcatcccgccttgcctgcctccccaccagcatcctgcctccccaacagcatcccacattctcaagagcatcctgcctccccgacagcatcccacattcccggcagcatcccatctcccttctttaagaccacaggtgtgattctgggcatctcctttgctgctgttctcatctggagccttacctgtgattcccctagaatttactttcagatttcagccttgagattccctccatccctctctgggctcatgctacaggcctcaagatgaagcatctatctcccaccgacactctcctctcaagacactaaccgcagccagaactagctgttgctgagggtgtgccactgacaaggccctgaagtcatcactgtctgctctctactcatgctgtcttgggtggaaacacttggccaactgaaaatatctaccaaaccacagaactctatgaacttcttgttcacagttactcattccagcaggcagggactgccagagcctgcctccttccacaaactgtgtgtggctgagataagtttccagccaacctaggagcctctttcatgccaagtttgcagacctctgggaacggtgcacacagcactgtatgcccaactctgtgctttcaaaccagaaccagagcccaaggacagtcaccatcattgagttataatgtacaaaagatgaaatatacaaaaatccaaattcacccaaggagtctcaagggagctgattgcttatccattgtgtttttaatgggatctccatgtgatgcacaaagcctggatttttatccgcagtagcagcttaactgatgcactggtccaaacataatgctgtagcttgctcacataaaagccagggagcccctcacagggataggaatgaggttcccctttatcagcagtgccttggatcagaagtgtagtgccccagactatgtgactcttacgcaggagaattgggggattaaattacggcaagctttttattccaatactatatcacagcatgaaataaagtctcaaaaatgacaacaggctttgatttttaatgaaaatctcagacagttgttttccagacatacatctgctgccgaaggaaaaaacacatctcctcagttatttactcccattctgagagtaacattgaattcctaggagccaatgaccagaagcgaggaggaactcaagccttccctactccggcagcacatacaccagctcacctgggatgctgcagagacagaaacagccgactcggagacctcagggagcccagagctcctggcaacagctggacctttaagccacaggccttcatagagattgcccagcctgcactgaatgcctgcagggtggagaacccactccccatgatgctgagtggaggacaggcaggcttcactcgccaccacattctcaggcccagccttgctctaagtgggtgtcaaggtggtatctcatacacgcctgtcctttggaaccacacgacaaggctaaacttcacaggaacactgcaatcttagaaaacagcaaaggttaatgactttcttcacagaattggaaaaaactactttaaagttcatatggaaccaaaaaagagcctgcattgccaagtcaatcctaagccaaaagaacaaagctggaggcatcacgctacctgacttcaaactatactacaaggctacagtaaccaaaacaacatggtactggtaccaaaacagagatatagaccaatggaacagaacagagccctcagaaataatgccacacatctacaactatctgatctttgacaaacctgacaaaaacaagaaatggggaaaggattccctatttaataaatggtgctgggaaaactggctagccatatgtagaaagctgaaactggatcccttccttacaccttatacaaaaattaattcaagatggattaaagacttaaacgttagacctaaaaccataaaaaccctagaagaaagcctaggcaataccattcaggacataggcatgggcaaggacttcatgtctgaaacaccaaaagcaatggcaacaaaagccaaaattgacaaatgggatctaattaaactaaagagcttctgcacagcaaaagaaactaccatcagagtgaacagacaacctacagaatgggagaaaatttttgcaatctactcatctgacaaagggctaatatccagaatctacaaagaactcaaacaaatttacaagaaaaaaacaaacaaccccatcaaaaagtgggtgaaggatatgaatggacacttctcaaaagaagacatttatgcagccaaaagacacatgaaaaaatgctcatcatcactggccatcagagaaatacaaatcaaaaccacaatgagataccatctcacaccagttagaatagcgatcattaaaacgtcaggaaacaacaggtgctggagaggatgcggagaaataggaacacttttacactgttggtgggactgtaaactagttcaaccattgtggaagtcagtgtggggattcctcagggatctagaactagaaataccatttgacccagccatcccattactgggtatatacccaaaggattataaatcatgctgctataaagacacattcacacgtatgtttattgcggcactattcacaatagcaaagacttggaaccaacccaaatgtccaacaatgatagactggattaagaaaatgtggcacatatacaccatggaatactatgcagccataaaaaatgatgagttcatgtctttggagggacatgtatgaatctggaaaccatcattctcagcaaactattgcaaggacaaaaatccaaacaccacatgttctcactcataggtgggaattgaagaatgagaacacatggacacaggaaggggagcatcacacaccggggcctgttgtgtggtggggggaagcgggagggataacattaggagatatacctaatgttaaatgacgagttaatgggtgcagcataccaacatggcacatgtatacatatgtaacaaacctgcacgttgtgcacatgtaccctaaagcttaaaggttaatttaaaaaataataataaataaaaataaataaaaagaaaaaaattagagctaaaaaaaaaaaaagaaaacagcgaaggttaagaaatcgccccaccttttatgttctgagaacactgaaaaaacccctcatatgacttagataagagtcacagttgcccacccccatttacctatgataaggtcagatacagaccctcaaactccctttccttgagtcataagtgatgcactgaacttcctgtcccactgatcaattggaacaaaatgctggctaaccacactgtggcaaaacatctctccttctgagccagtgcacagcccctcctgagaacactctgggatgtaccgtctggtctcaatcatgccatctccactccttcaagccactttccccacttggttctttctggccttgttggctccccttcataaaagaaacgccctctttgcctcacccttgtgacgctggcagaccccacagttggagtgatctccttcctgtggcaatagccctcttccccatgcaagaatcttttccaataacgtctctccttactaagaccggattagttttcatttggtgcgtcacagccatgatatcgacagtagtcggcaccatccccgcaactgcgcacacacacctgccatgccccttgttgcctgcgtgatctaattctgtacagcattactattaccagaaagagagagcaaatggcagagagagaaactgaggtgccagggcatcagaaagtgaatgaagaagtgctgaagccatcccaactcactctgagccaaaatctccccactcttctggtcgtgcacaatccatcgattcctgagttttgcacagtgttccagtgttcctcagtgtcacaactacctcaccaccctcccctgcaagatctcagaggcctttcctctgtggttgaatgatgagcatctacaatgcttgtgaaagattctgtcagtctcccagaagatctgagattaccaggttctgagaatgaagtgggtcaataaataaagtcaattggggtgtggctctgtagagttgagagggtgtgacagagaccctgtttcaacggtggccatagcagtcctgtcctgaagctcttctctgatgtgaccaatgttcctcccacccagggttggtctacacccccgcccctgaaaatgcgggctcttgatgcccccaggatggacacaatgctgtgtgacttctcaactgagcaagacaacaaaaggggtcagaggccaccagtgtctccctccctctcgccctcctcctccccttcccccattccctcctctgtgtctccctcctcctccccttcccccactccctcctctctgtctccctcctcctccccttcccccactccctcctgtctccctcctcctccccttcccccactccctcctctctgtctccctcctctctgtctccctccctctcaccctcctcctcccctgccttcctctctctcttcatctctccctctctccccctgtctccctcttcctgctcctccatctccctttctatctctctcccccgctcctccatgcttgcccatggaaccggccaccatgttataaagaagcccagtccacatggagaggctcatgtggtgtcccagctggagccagcaccctgtaggcttgtggctagatgagtcttcagagattccagtctatgaccttcacatcttccagctgaggcccatgatggagcaaaagcaagccatcccactgtgccatgtctgaacttctgacccagagaaactgtgggagatagtaaaatgatcactgtagttggaagcccccatgtttagaggacatatgttatgcagtaaaggacaaccaatccaagtggagatggagatgatatgccagtgggtcaaagctccacaccctccttctcctgccccctcacctctgcccaggccacccgccagcttctcatgctctgcctgtctctcctgctcactctctcacggaaggccccacttctcatgcctggtaaggctgctctcttgtttctgctaccagttcctgtggacccatctgcagtcatcgccgccaggtgttcctgcttcagccgtctctgcaaggccacagatccagcagccaagagttgcgtacagcctggccatctgtgagagatgtggcttcccaattagaggtgacatttcagacgagtcaacccaggagccgcagcctccgcacaaagacgcactgtgaataatcacagagataacaaagtgactgctagaaagaattcattaattgggatcatcttcaccccagaaatacatgtgaacatgacatttgacagcatctaaattctaatttcacacctgtctgcagccactacctcctttctccttcagctcatccactctgacacctcctgctatccatccagagcttcacccagacaccatcccaccccacccccacttcctcaccctgcaacagtccctcctgcaccagcctgggttgcaagaccctgcagggagcccaccagcccccacgacatgggtgcatcccacctgccctgggccggactctccctccaggcctaggactgtgcattcctcatcttccccccatacttggtcctacccctgctcacgacctttgctcctatttcaccccaaaaaagtagaaacaggggctggctctacccttaggcctggctgcctctgctgcccccagttgctggtaagccgagggttccactggcctcggggactcacacccacccacagcttctctggggctgtgccccttccctggccctggctatcccatcagagtctggcctgctctccacttctctctcgccctaaatgctcttttcttacccgtggaagttctcactatagacacgttcacccattcccataaactcaaataaccctataagcctaatgactccctgttataaatccagacccatttctcccctcagctccagttttgattttccagggtttaccccatgtggatgcctcatgaactttatacacagaagggctcacatgtgctctggtttcctccacacacggtaggtcaaggcaggaaaggcggttcctccctttcctcaccccaacagcaatgccagattatgaaatccccaaaatgcatctcacccatggcccctttgctccgtttttcactcctgtcaccttccctgaccaccacgacctctcttcaagtgcttcagattgcgcccatccattcctacccaccaccacccgccctgtccccctcccctcccactccagctctccaacccatttcccacagagcccggggaggggggtgccctttaatgtgcatgcattacatcactgctgcacctgcaactattttgacagctcccattaggtatgaacagcattcctccctgttccttgccacaccaggctaggcgtgacctgtctccagaggctcctccagcctcatcctatgccactctgtggcaggaatgccttcccaccaaccttgtgcaccagccatggggtcctccttctgctccttgaacactcccaaatctagtctaccacagggcctttgcattagctattctctttgcctacaatgatctttcccccgatcttcacggacttggctaaaagcctactcttagaggccttctcttgacaatcctgtctacacccagtcttccctttcttacttgctagtcactccttctttgcaattcctttatttataaatagatcatgcagggttctaggttctgttcccttcataacatacaatgtgccccaaatttctttatcatcttctgtgtttgtgtgtgtgtgtgtgagcgtgtgtgttatctgttttgccacccaagggcagggccatgactcttgtttattgctgtatttcacattcaaaagtacacacctggcagtaagtcgatgcccagttactatctgttgaacaagcgagtgaaagagtgaatatgtgtatgtcatgagcaacaccaaggacagtgcagagttttccttgtaatcctgaaccccagaagatgaaaaaggatgaaaaacgttgtcatcaatgttttctattgtgtgcgacctctcagggacattgataaacaggacaaaaatgtagagacttgttaatcacaggaaaagagctgccctttctccagggactcaggggaggaggcgtcactctgacttgtgcactctgtctgcgaccttctgataaagagctgacaaatcaagtcaactcagacggctgtcattttgtgcgttaggaggtgtttgaggtaacagctgtctttattcctaggagtggtaaggcaagaaggagctgtcagtatttcccacactggaggctgcctcaaataaaagcattcctggtgtaaggacagccatagatgttactgcactaacagcaacctggtaacctttgtcaccagggttctcagctaacaacatcttggttcattgctttgactgatgaagctctggaaacctaagtgattttctttgtgtttgtcctggacgatgaggcaagcagagaaagataaatcagaaagttctttgtaaaatattgtcaggttcccaaaatgatccttggaaaaaaggatataggcttatctgtctttactttttagaaatacaattaatgacagacacagactattttagtgtccccacatcctgtctatcaaagacagggaatcagattgttctttcaaagattgccctgttcatttactttaaaaacatcttgagcacccatcttcagccaaacactaaactggatcccaagaaatagaaatgaccaagacacaatcctgatctccatgatcaggattgctggtaagtgaagaaggcagaaaaataagcaaaagatcccaaaatggcaggataggactgtgatggaggtgttcccagggcttcaccagatgggtaagtggaggagtgagtgaaggtagcagcagaagaggcagagagagctctcgggggggatggatgactggaggagcttcattctgggcaaaggccaagaatgtcagtgctggagggtgacgggattcagtagactggcctatgctctttgtccaaggcttggcatctaacatgtttaaatgcagagctctgcccacaggaggccaggcaagggaatggtcagtgctggaaacataccttttataggaactcggtggccatagtgtatggcaccttctctttgtagagcactcaatgaagacatgcttttatttggttatgccccatcttcccaaagacctggaaagctctttccttcaccactaacccccaccaccaaacatcttttggagacaatcctagcccaggcccagggccaggtattgaggacacaaagatgaggaagatgccatcatcacccctcaggtacaacaatcaagcagaccttgaaggccaggacttcctttatctccttaaacccccactgcatgcataaaataaaatgggaaacttacaaatcattgttggctgagttccttccccaactctgtctttcccttcattcctcctgaattccagccaatggcagattcacagggaacacacttccagaaagcagagagcacagagcaagggagtggacgacaaatagcaatgctgaaactttcaccatgtttgtcagatgtcataaacacttaaaaaatgattatactgactgtgatgacattggaatatggaataaagaatttttataattgttaaatatgtgaagcgtaccccagacatcgtgatatgtcacccctaaatacttggtatgaggacattttaaaaactgactctggtagattcagggccatatcttcagaacaaataataacaataataatctttgacactgaaataacatgtagaaggaattagatttttggtgtagagctaaggagttcaaatatatatataaatatatttgatatatatatatttgatacataaatatatataaatatatttgatatctatacattttttatatatatatatatccttcaagtttttatatagagagtgaatttcatggagtgagtaattgaagctttatttaattatttattttactttctgagacaagctctcattttgtcacccaggctggagtacagtggtgtgatcataactcattgcggcctcgaactcctgggctcaactgactctcctgcctcagcctcccaagtagctagaactataggtacacgccattgctcccagctaattttttttagagacagggccttgttatgttgtccaagctggtatgagacctcaagagatcctcctgcctcagcctcccaaagtgctggaattacagatgtgagccactgtgtccgggcaacagcagttaaacttagattgtcatttatttacttactctcaatacagagtagttgatgctgctgtcaaagtagaagaaatagccccagagaacctttcagccactctcaataagttggtctagtgtctgtctgtttcagttatctattgctgtgtaacaaaccaacccaatgcttgtggcttaaaataacaatgtactatatatatcacagttctgtgggttgcctaggcaattctcctgtactagtcagggtttgctgctgtggctatcttcagctgatggctgggctgggctgggctggacagcccaggatgaccttgcccccacgtctggttggcactggtggtggctgctggctggaatgtctcagtcttcttcccacaggctgcaccatacttccacctatcatggaggtctcaggctccaagagagtgagaatgggagttctcgagaccagaactagaatgtcattcctccagtctgctggtcaaagcaattcccagggctaatccaaattagaggcttcacttcttgctgggaagaacagcaacttcacgtcgcagaggggtgtagccctaagaggcttcgctgggaaccatttcactataagcatgtgtcacagtgccaggaaaagcacaaaggaacctcaggatgtgcaacatttaggcctctgctaaaggttgaaaggaagggagatattccccaagagatcctctgatgatcaaggggacaggctgctacacatgggagggatgcctggctcccgtgtcaaagctgcacatttgctatgtctcattaaggtgtttccttcaaattcctggggaaatgaccatcggcatgtctccctatggccttcactagaaatgctttttcactcagaaatacaattacaaacaagcatgcatccagggagtacaaccccagccggcatgtgtcaatgcatcagccgccggttcagtgaatagaactatgagaaaacgtgtttttctggtctcactttgggctgaaggtcagtttcattcccattcaaagagagcgtcgggtcacccaaggctcctccacaccctggctgatccaaacaaacatgctgttcttggcagaccaaaactcctgtctctgcaggattgctctctggagtccagcgttttcatgctccatctccaaaatggggccacgagggaaattgctcaagacacagagttttgatcagcacaaaatatacccctcctgagaacatgagcacacatggagagccatgtacaccaggtgagaaccagcttcagtcccatctccgtgccctttcccatcagccagtcctgcccaagcagggacattcgccccactttctaaacaagcacactgaattcaacaatattctggcaagtcatgaagagctgttgtctcgttcattttggtcccaccatcacctggcaagatttcaatgcactctggctgcaggctcctcctgctgagatcattcctgtgtatccccgacacatccaccctcattcatttcccctgtcctcacagaccaatccagggtacctggaacagtcagggaccttgtttgcaagcaacagagtctgaagctggctaaggcaggccaaaagggaaatttcaatagaaagctgtctaagagctcacagaatcaatgcacagtttggcaaccagtcttacatgttcctctgggtatatcatgcacccctaatgtggctgagaggttccaagaagcctctgctgtttaataacatctacactgagacctgagagatgtacaagactcaccagtgcaaggtatcaggaggacccagcagagccactccctgccagcctccctcagtttccatcagctctcttgcaccagacatcactgggcttccagaccttacaccacctagggatgtcctagtctggtcttggggaagtagtgctcctttgggagtcaggaagtcgaaatattttttcctgccccaggatccagggaatgacactactcagctatgggcttagttccttccagatatggaagcatgtggactttgtgactttgaaggcccacccagtcttatgttctatttagcagcagagaatcccagcttctctgtgttctacctccagctttatagaatcatggcatgttttgcagagtagtcactgtgactactactgcttactgagcacctagtcaaccacaggctgtgccctaatgaaggtaacactgaggttcctaagcttcacagcaaccctgagccagaggaccccggactcctgtttacctgtcccccagatatctctgggctactaaactctcacagtacaaattatcccaatgcgcaaataaaatggttccaatccccactccgctcccagatggcaaccatacctgagtccacagactattcagcagccagcacagagtgtccaccatgctccctgtcccctcagtggctgttccttgttaacttctgctgcccacaaaccacctgccacttgtgcctgtcacaggcacaccacgctccacatcctgagctctcccagctatttggatgttgaggcagggctgggctctgtgcagggtgaggggttcttctatcatgtatgtggtcccttgggcccaaggcaacttggccttcatccagatgcctcatggggttcttttcttaaggcccattcttccaactctgccttgcccagaccctgtccacagcactgcgttcaaatgtccttccatcttctctaagggccaccatgcacagtcacattgttctttcctcctttgagtaaaaaaccaaagttccagacagaacaagtcacttaatctgcagggcccagtgcaaaatgaaaatgcaggttcccttgttcaaaactgactaagaatctcaagacgatgaccacaaagcattaacctagcatggggcccttctgagccctgtgcgactgcacataccatgtgctgggaagtcagccctggcgccaggcacctgggtggccatgcacgggtggtgaggaggatctaatgtgcatgtcaaaggccaaaagatcccatgtgggaaaaccaagatgctctatgtttgtgcaactttcccatggctttcttccactccacccctccaaagtgctcagcaaatgaatttaacaactgaatgaaagcggggaggaacaaacctatgagttggcaggaagcaagactggtgcttgggtttcctggctccttcttcattgtttccactcttcccaactgccaaccctgtgctgtaggagttgtttgccttaagggaaaggtataattttaaatttataactaggtcagagtagcccagaaactttttctatccttgctagggagctcgtgccccaccctcttgagtgactttctcaaaatattttgcaaatgtcctctccagtttccagattcgcctgtgtcaacacaagattggtaaattaaccagaaagtataggacctgaactcagacgctcagaattgagatccctgcttgaaagtgagaactcaagcaccttcaaaagtgtcataaagcaaaatcgcccggctgtccttccatctccatgggggaagatattttttggaagggcttcgatgatttccctataatatttttgcctgtgtcactacaagactctgtcctaagcccaagcagaagcccctgtgagaagctgcaagagcaaaactatatggtatagagggaaccacttgcagacaggcttgttttgcaaactacttgtatttgtcttattttttatttatttttttcgcgacggagttttgctcttgtcacctaggctggagtgcaatggcacaatctctggtcactgcagcctcaccctcctgggttcaagcaattctccaggctcagcctcccaaatagctgggattacaggcatcctccaccatacccggctaatttttgtatttttagtagagatggggtttcaccatgttggccaggctggtctcaaactcttgacctcaggggattctcctgcctcagcctcccaaagtgctggaattataggcatgagccactgtgctcagtccttttttttttttttttttttttgtctgccctaatcctctaaataaacaacaattaagctaacagcagtgagaggataaaaccaacataatcttttctgtgttcttgttgcatccagaccttgcaggcatcgtgcaccctgaattatgcttcttcatccacccctcacccttaccaactgaacacattattccccaaggtgagatgcaatattataaatgggtcctagagcgacgagcggctgagctctgcaggagaagcccacacagggagctgtgtggagggtgggggccagtgctggaagaattctggttttcattaagtttaggcaaagttaaccacatggacgtattcttttctgctaatttcagacattctgagttttaaagtgcaaactaaatgcattacatatctagaagacactggaagaaggcagaagggatgatatagtctgttgtggaaatcgagaagtggacttcctcaaagggcacatggcaatgcaattacggcaaagcatggctgctggaggatggagctctttaaagcagtcccatgaatcttgctgtgccaatgtcaatcctcacctgccttctttccctgccccagccctgccaggtgtgtttttttaaatcttgattttcttgtgaagtaagatcttgttaattagaatggaaacagcaacaattttcaaacaatatgtcttttggttattcatctatcagaaagaagagaagttgatatctgggaataactaggaacaattcatgtttgggttttccctataaaatggaagaatagagcttcagttaaataagccatcatggaatgggaaaggccatggtgaatgctgtgttgtggtttcccagacacccctcatcccctaacagaccacgatggtggcgccaaaggctccctgctaagcccgtctgggaaatttccttggcctaaagacagccacgtggcccaacgcccacccctccacctgagttccatgttgtctaccttctgatgtgaatttcctttattcattcttagaagaggttccatggtacagtaagattgcaaaagtccagtgacaaggcccagaggtggggtgtggaggggagcagaggtggagagagaaagaaataataatgcaataaaccagtacgccacacacttgggatactcagtaaatgtttgttgggttattgatctatttatggaaacacttgtaaataactaaggactgatgatcctgaaagcaaaatatagtcttcctcccacttctcctgaacttgaagaatctcacagaattctgtatttataccagcagcatatgatatgatttgaatcctgttatttcatgagatgtttaaaccagactttctcaatctcagcatgattaacattcggggctgggtaattctttattgtgtggtattgtcctgtgcattgaagtattttctaagtaatgcccctgacatctactcactcaatgccagcagcacccccagtcccagtgtgaccagctgtctccagacactgtcaaatgtcctctgggagcaaaatgtcccgccttgagaaccactgatttagagcaatgacccagaagaactaaatatttattcaagaaaagaactctgaattattttgactcagatctgcaagaacatttttatctatttttttttttttttgaaacagggtctcactctatcacccagactggagtgcagtggcatcatctctgctcaccacaacctccccactcccaggctgaagcaattctcctgcctaagcctcctgagtagctgggattagagttgcatgccactaccacttggctaatttttgtatttttagtagaacgagtttcaccatgttggccaggctggtcttgaactcctgacctcaaataatccacccgcctcagcctcccaaagtgctgggattacaggcctgagccaccatgcccggcctgcaagaccctttttcaataaaaattggccagctggaaacaagatcccagactccacagtgatctggtccaagcatcctggttctccacggttgttgtgtcttcctccccataaaagccaggagcccctctcacgctgcttatttgttccggcattcatctagctgagcacctgttgcacatcaggcattgctctgagtaatgcggataaagctgcacacaagacggaggctagcccagcctcaaagaactttccctctagtggagaggaaggggacggcacacaaggaaatgaatatacaacttcagtgggaagtccacgtgaaatggaagagttccctgaacctcctcacatgacacgcaataggggtgtggctcatctgtttggccacctcacctgtgcaaaccccttacaggaaggggagcatgcagacaagcaggtgcaggagccagggcaagcaccttggggctccagccccatggtagcttctaggggtgggtgcctgcaactcccaaagcccaagtaggcatgtgttaccatgcattcttttagctgtgctgcctgcagatagcttaagtgttaaccagctcagtgccctcatggtacctaggtccttgtccggcatccaggaagaatcaggtcacacacagacttgaggatggtgaatgcagggttttattgagtggtggaggtggctctcagcgggatggatggggagctggaaaggggatggagtgggaagatgatcttcccctggagcttggctgtcctgcagtctatctcctctctgacctcccccagctgaatttctcttggcgttcagatggtccctttcttctctctgccatgccattctgctgttcttctgttcttctgctcgttccctcgtctgcttctgaagcctagggtctggggtttgtacaagtacaggataggggggcacagcaggccaaaaggcaacttttgggcttgaaaacaggaagggctgttcccatttagggccacgggtttccaggcttgagggtgggatctttgctggggaaccgcccacttctcagtatttccctgtctcctgtccttatcacgtgtagagaaaaaaggcactcagctagagagggatggggaaggtgtgagctgttttaggtaggagggtcagggaaggtctctcagatgaggtgacatttgagcagaaactaggatgaaaagagaaagccagccctgtcagcgtccactgcaagaacagctaacctctaaccctcagccctgggaaaggcgcaaacacagcttgctctgagaacagcaaacagggcactggagctgaattggtgtgaacaagggtacaagggggagaagatgaggtggggagatggaaggtgcatgccatgcagggacttggctttgattcgattttggcttatagtcagagtgagcgggaagccaaaggagggtttgagctgggggggactgacaagtttctaaagaaccactgtggttgctatgttggaaataaaaaatgagggggttgggtaagggcaggggcaggaaactatatcagagatgtagctaattaggatcagctgcatggggccaaaattcccaaataacaatgacttcagtaacacagttgcttctctctctaatgtaaaccaagtatagagataggccgattgaggctggtaatggagaccttaaattttcttccagcctgcttccccgccatccaacattgctgcctcacagtcccagagggtggttcagtcccagccagcacgcctgcattccagcaagctgctgtaaggaaaggtcaaagaagaacccattctgtccttttaagtgtatttcctagaagtcgtataggacacttctgtttatttcctattggccagagctccaggggaggctggcaaatgcaggtctgtattctgagctaccatgtgccctcccacttcaaaataatcgggagttctgttcctaaggaaaaagggggatgaatgcgggagaccattagccatctttaccttggagaagactgcaccagtccaggtgagagatgatggaggctcaactgggacggggagagtgggggtggggatgaaaaagaaaaaaacttatctgaggaatatgagtctttttaaatgtcaaacccacaacaagcatgttaaaaaaatggttaacatcactaatcatcagggaaattcaaattaaaactgcaataaggtatcaccttactctgcaagaataacattaaaaagtcaaaaaacaatagatgtttgtgtgggtgtgggtgaaaagggaatgcttatacactgctggtgggatgtaaattggtacgacctctgtggaaaacagtatggagatttcttaaagaattaaaagtagatctaccattcgatccagcaatctcactcctgggttatctaaacaaagcaaaataaattattatatcaaaaagacaccagcacatgtatgtttattgcagcacaattcacaatcacaaagatatggaaccaacctaagtgtccattgaccaacgggtggataaagaaaatgtgggatgtatgtgccatggaatatactactcaggcattaaaaccaacaaaataatgtgtcttttccagcaacttggatggagctggaggccataattctaagtacagtaactcaggaatggaaaaccaaataccgcatgttctcacttataagtgggagctaagttgtggatgcgtggaggcacacagagtggcataacgaacactggagactcagaaggggtagggtgggaggggtatgagggatgaaaaactacatattgggcacaatgtacactacactactcaggtgacaggtgcactgaaatctctgacttcaccactatacaattcatacacgtaaccaaaaatcacttgtactcaaaagctattgaaatttaaaaaataatttttaaaaataataataagttgagggtaagggagtacatggatctcactgtactttctgctcagttttgttgtgaacctaaaactgctctatgtaaaagaataaaatctatgtaaaagaattttaaaaattaaaataaaaataataaaaaatagaaataaataaacatcaggccagagagatattaaaatgagacagcaatcatgtgctacttctgccttgagctatgaatttatctcctgaaactgcttgctattgccacaagtagctatgtcttatgtagctaattaacataataatgcttcagcagacactataacccacactctataacttaacaatgtgtagccaatcaatcactaaccaatattattgcagttaaaccaatgagaattcctaacaaaaaacttcatactggcccactccctgtcccccttttctgcctttgaaaatccccttgtgagtgctgctgagggggtatatgtattcaggcagcttgaatcaatgttcccaggttgcaatcctcaaggttggcccggatcaaccctacttatataaattgtgccccagcttcttctttttagattgacagtggatatttagaagtggtgaaattctggaaatattctggaggcagagctgacctgttttgctgatgacttaggtgtggatgtgagtgacagaggggagccaggaatcaaaattgttttcagtttccatggctgcacaacaaattaccagaaaccagtctgttgaaacaacacagataaagcaaacagccctctagaaacctgggtgcaggtctcactgggctgaactcaaagtgtgcatggggctgggcttcttctttgggctctaggggagaatccttgccttgcctcttccagttctagaggctggttgcattccttggctcatggccacctaactccagcctctccttctgtagtcacctccccttctctgactctgatcttcctgcctccctcctatcagaacatcaggcccacccagacggggaagccaggatcattgccccatcacaagatcctcaactgaaccacacatgagaggtctcgtttgccatgtaaagtcacgtagtcacaggtcccttggattaggacatggtcatcattaggcggcattattctgcctccgcagaagttttagctgaataaccaggagactggacttgtcatttagtgagatggagaagaagaaggtttgtggggaagggcaagagtcaagccctggttttggcggtgttgatttgggacatcctactaggcacccaatgaagagaagtggagctggctggtgggaggttcaatatgaaatacagggatctgagcaggaaatgtaagttgtggggtcagcaacaattggataggatgtgcgaccccaggacgggctctgtttatattgggaatgtaaagaaagtggtgtgggaactgaactctgaatgccagtgcttagaagactgggccatgaggaaaaaccagcacaggagactcataaggggcttctggtggggagagggagacccagagagtgtttcttgtttcttttatgagtttcattggcaacagtaagaaaaagggctccctctctggcttttgcccaataccctgccactgcaccccctgctcaggaagaaatgcaatcggttgaggcagcagaaacaggacagagggcagctgggaggttgaatacaccttaggagtgagaaggggtaacaaggtcttttgggactgacagctcctaccttttgggtggcagcagcaccttccctggcaccaggtcccatccttctctgcaaaatagctctttctgtaggatgttacctttcctgcaacagtggacctcagcctcagctatgcagctttgaaaagttcttatgcttgggaaccaccccagaattttggatttaattgatctaggacgaggcccagatagggcaagcttaaatggctctcctgctgattccagcatgcagcctgctctccagctacagcaaaccctccatccactgcaatccctgcaggaggctgttttgctagcttatacctcagataaagtcctttgtgttttaactgttcctatgaagtcctggtgaggacgtggaagaacaagagctctcatgctgtgctggtgggatgtaagatggtgcaagtgctttggaaaactggctgttccttaaggagtgaaatgttcacttaaccacaaggtcacaattttacccctagatacttactcgagggaaataaagggtaggcgcggtggctcatgcctgtaaacctaacactttgggaggccgaggcaagtggatcatttgaggtcaggagttagagaccagcttgaccaatatggtgaaaccccgtctctactaaaaataaaaaattagctgggcatgatggtgggcgcctgtagtccaagctactggggaggctgaggacaggagaattgcttgaccctgggaggcggaggttgcagttagccgagaacgtgccacagcattccagcctgggcacatgggcatagaggaagactctgtctcagaaaaagggggggtgtggggggcaggggaaataaaaagataacaccacaaaaaggcttctagacaatatcccctagaagctctatttgtccaaaactggaaacagcccacaggtaaataaagagattgtggaatagccatatatggaatgctactcggtgatgaaaagagacagaccatcaatgcactgaacatggatgagtcttgaagatattatgctgaacaaaagaacccaagtgcaaaggaccacatataagtgcaattccccatgggaagctctagaagaggcacacccaatccacagtgacaaatgcaggctgtctatcaaggaagaaaatggtccctcaatatccattttctccatccccaatattcctctgagcacatggccactcagcataaaagccacattcctcaacatcctttgcagctgtgcatagccatgtgcctaatttccagccagcaggaagtaagcaggaagaagtgtacaacttctttaaaaagaagagttaacgattttgccatctgagtgatgatgaggacgtttccagccaccaagattgctgatgccgaaaaagaagagttgtctcccctttccttcccaccttggtcaaaatataccatcttgcttgggtcaagaagataaggaatgggacaaaaaagtaccagacaccgtggaccatcacatttgcctggacttcctacacctgcactattatgtggaaagaatgcaagttatgcaagttatttctttgtggaacctctcttatttggggtggctatcagagcagacaaatctaggtcctaaccaattcaggttcaggggatgaagggggctgaaatcacagattctcaggaggttatcacaatgcaattcctcattcagaggacatgaggaattagcagacaagctgtggggaaggaatggagcctccgtgtctccaacctccctgtccaccagggcagccactggaaacccaggacttggcatatcccacaagtaagagaaacacacggtgtcctccctcccgagccaggcctctcacgcgcgctgatgatggcagtagccatgctgctctcaggaccaaggaatctgtcccacagccgctgggaggtgtgttggccgataccttcagctgtcagctctctccaggagccacctcagcccagccgagtccacatgaagtcttgtctctcctgggagcagctgcacccaatactgatccacctggagtgtggaggccctcccctgagctgaccagctctgaagagccattatagcctgacaggtccccagggggtggctgaggcctctgtggagacacctgcagccttgtttttccctggtgaacctcctgctctccagtctcaacacagagctgctccccctctggaaccagccagtgacaggcagacagctatgtgtggaacacaagaagcaattgcaaacattctctccacacaatgcccacaagaccccacaggccactactactgaggtcaacagtgggttctaccagtttttttaaaaattagatgagtctgggcatggtggctcacacctgtaatcccagcactttgggaggccagggtgggcagattgcctgaagtcaggagttcgagaccagcctggccaacatggcgaaaccttgtctctactaaaaatacaacaattaatcgggcatggtggtgggcgcctgtaatcccagctacttgggaggtagagggaggagaatcgcttgaacctaggaggtggaggttgcagtgagccgagatcatgccactgcactccagcctgggtgacagaagaagactctgtctcaaaaaaataaataaattaataaataataaataatatataaaaattaggtgaaatgaggaagagccagtgtcctgggctggatgtcacccatatcccagatgaggcacatcatctggggggcacatcacgaacttacccacaatctttgcctaagtcacaggagggctgtaaagagagccgggagagccccagacacgcagagaggctgcaggctgggaaggcttgaggggagaccctcaaccagcgccacggggcaggaaagtggggatggcttagacggctaaagcctgctgaatgacagaaacacccttgtctccccagacggcctcaagaagatatcatttctcgacagtgccatagcaaggaatttttttctgggaattaagcagtgcaacgcaagggaagagggaaccgcaggaggccataggatcccagcagaagcctggggatttcagcatcacctgcatctggaagggcaaggacctgaaagctctataccgctctggccgctggccaccatccgaaggtctccccagcagccggcaccctgcacagggttcacaggaggctcagtgtctgcacaacacagactgcggcaggagcagagggacaccacactggcaccagccactgggcctcagtgggcccctagagattagatttctcccttctggcaaaagagcaaagtgccatctcaagctgcaggtcaaaaagttctcctatgtaattgtccacttcttttatttaagaactcaaggtaaaaacaaatttctgctctaactggcagtcagacctcacgctgcttgatgttcacagttcccaagcctgagccactgctggtcatcagggttggtggtcaagaggacaggctggacctgagcaaaggagggccatgtcacgctgggacctgttggacatctctgcatctgtccatcgccatatccgacctcaaccatgcttgagagtgacaactgccacctcactgcagcctcctggatctcaggcaagtttttctttggccagctgtaacctggagctgcgcagggaaggggttcaggtcacagagcttggccaggtcaaaaggcaccatccagccagagccctgaggtgtagctggctggttcttcaggcgtgtgcagcccctccctggagtcctaccccaacaaagagcatgacgctgctcctcacagtggcccaacctcacctctcagcctcggtttcctcatctgtacaatggagacagtcataaaacccatctgacaggaccattgcaaagatcttcaaaaactacaaagccataccaagatgaaagcaatcatcaccatttaagatgagaaaagcagaatcttgaagaacaatgttcagtttggagcatcagtttgcttttccctccccctaaaaaaactccacaatttaggagctgctgccaatcatgaatcctgacagtgaataatgataattttgcaattgttttacacaagttatttaaaataaaatatctgatgtgatttccaaattacagggcttgttcctaagcaacagcacaggctttaagaaatatgcacaagaacagagagaatccagggctgtgttttagcagcagctgtgctgggtaagggtaagccttggccaaggatgtctgcctttccctcaccattgccctctgccttagggatctcaagaagaaagtgaccttctcttcttctttggggaggcagttgactcctgacacattggcctggtgggccatcggcttctaccctggcttccctgctgctcccagccattggtccttcacgaaacccccaaggttcatgtaccacattcttattcagggctggtagtgcatctctgcaggcccttgcacctacaaagtgcaggtggccaacttctggcttgttggggcccctgctctgcacacacacacgtaggtggaaccgccctcctgagacctcttggttttcatggaccatggtaccaccaaggcatttccccttctcagcccaagtctttagaaccccatctcttcctcatgcctgtagttgcccagcaggctctcattcagtccttgtccactcttcttggtgggcccagacccatctcttcagtctttttccttcatggtggagcccataagacatggggccaacaagaccccactggggcttgctgtttttatggttaacagtgggctctatcagtttttaaaaattagataaaatgaggaaggccgagttccctggtttggatggataccatctcttttgctgagctgctacctaaacgaatgcctttatttgccatctgctaaaagattaggtccttgagagctgaaacgactaccctagctgaagaattgtatctgatgaagtgagatgctgttctttgctccatagtgcctattggagtcattccttgttgccaccacccaatgattaagattgggagaatttctctatcaaaggcaatttgtggaactcagtctgcttttgcatggctgcaccctattctcaacagtccagcacacacaagtcaaggatataataaaacttcaccaagtgtgatggttgttttgtgtgtcaacttgactgggtcacagggtgcccagatagctggttaaacgtggtttcttgtgtatctgtgaagctgtttccagaagagaccagcatttgaattggtggactgagtaaagccgatggctctcccccccgtgtggatgggcatcattcaatctgttgagagccagaataaaacaaaaaggcagaggaagggcaaacgctttctcttctgaaactgggccatccatcttctcccatcctcagacattgaagctcttggttctcgggtctccagtctcagccaggtcttagcacattggcttctgagttcttgggtggaagaactgcctgactgcttgagttgggacatggatcttctgccctctgcgcttctagtcctcaggctttcagactggactggaatccacaccattggctctccagttcttgggcctttgaactacagcactaggcttcctgaatccccagcttgcagatggcaaattgtaggacttcttgacccccataatcatgtgagccaatggcttataataaatctcctttttctagatatatatctggaaatatatttattcatataattcttacatttataatttatattcatataatttgtcacattattattatatattatatataacagcacacattgaagatatatagatttatatctccactatcctactgattctgtttccctggagaaccctgactactgtaccaagtgtagtagcattctgggtaacccaccatatcccaggatgatcacccacatacatgctacaactgcccctttcctggccttatttttttctctcttttcttcctttcttccttatcgaatatttatgacataggattacttatactcagagatagggccaagcttgtctcccacaaagatgaaagagttgtataaactcacctcaaagatgctccagaaaggaaatcaaaacagtttcagaacttgaataggaatcaggaaagaatcagtgttaaagtatatttctcaaaatacaaatcacctagggtgggagtgggggcttgtggaagttcacattcccaggtcctgctcagatggactgaatcaaaacactagagatgggtcttgagttcaacattttgagcaaacttgcattatttgtttgcttgtggttgcacacaagtttgagaaccaatgccatagatattcaggaacaaggacatatgcaggagctgcattttaggaagctaagtccagcagtttatgtaatatgcactaaggggagggggtgctggacacctggagaagatcaaagaaggatggaggcacttgcagtaatccaagtgtaaaggcagagcctcgagtcaggtcttgtagaagcagagccagagagaggggtgtgggtgcccatgactggagggaggactcaggaggaagagacggagggaagcagaacaagtcagggaaggagtgagatggcctcatatccgctgcagtcacacctcagcctggccccgctgggggctctggagcaggggctgcactgtggcattgatccaccttgactcacaggcaccatgtttgtaatgtggctatttccagccagcacacacaacagctgggggtgtgaccactcagtaaaatgaattgggcagggcacctgcagagttataatacatcaaccctggaacaatacacaccccttcgaatttactgacaggccaattttcaagccaaaaatacagtcctcaaaagggtgtcagtggctggccaagggaggtattagtggtgttagaaggagaaaaggaatcaatccctagagaagatgctacttcttcagggtctgatgatttcatttgcaaggatttttattggtgttttttctaagcaaagtttactggaaaatactaaaagagacccatggcagggactggaaagggaagaggaagaagtgactaagctgatgttttacgcatgactgactgggacgataacagtatcagaacagaaaggaccacattcaagtcttcttttctgtttctcagatgttcactagagccatatctgaccaaccaagttccttcaggagggactcaatcctgagatcgtcaattcatctttctctcacaatagcttcattaaaaaccccacaattcaatgctgacaaatccccattacttctcattataaatcttaaaaccataagaattagcgtcttccttactacataaacttccagacctcaaatctcaccttttttgggtaagggtaagctatttgttgacatttgcacaaacttttgcctggcagaaaatttttaaataatttctaaagaatcattcaaataaaatgccagacccaggaagaaagaacaatttcactcaccaacaacaataatgtctccctcagccatctatccacacacgtccaggcacatccctttttggtttggaactggtcaggtgtgcactgtgaaggcatgacaagttgcttcaggaaaagaacgatcaggtgcacaggctgaggcaggcagacaggctcttatctctatccccagtagatccatcacagggcataagaacagcatagctctttgagtaactggtttctgtgtaagcaatatatgacatttcacagacattaggctccctctgggaattcttcttctgcatggctcctttacaaaacgagatcctcttcaagactggttggtgcatcttggtcaataagaagaacatcagctctatcatcatctaacccttgagggttttcatttaaattattgattactacccactattgtaaaacagccttactatatcttgagtaaaatgccacttttacaacccttggtctctactttatatttttattatgagcttttcagatcctcctgatatggatttagcttacaatggtcaatgaaaaacaatccaaacaaccaacacgtatgaataaagacaaaacaaaaaaatttagaacccagaagtcatttggctttgactctgtccaatgccagctgagtccatttttcttgtcctattttctctgctaaatgagcccccaaaactcgttccagagaagtgaataaaatgcatgactcaggattcccatctcatttatctcctgcctcatggaaccagaagccccttttgtcctccatcaatccctgtttaaataatattcccacctgcaataaactctttcttcagtctccaccaaagggccagcccgttgcatgcaccaaccttcactgaggggttcggggtctgagaagtgactggctttgcccttctatgcatgcttgctttattacttaaggttatgacttaatgctacttaatgaaaaccctggctggcgggtctgcagagcaatgcttcagaaagggctctggatagataatcaccatttgccagagcccctcagcattcccagtgcctcctttctttctttttttttttttttttgagatagagtgtcactgtcgcccaggctggagtgcagtggcatgatcatggttcactgcaacctccacctcccagattccagcaattttcctgcctcagcctcccaagtagatggaattacaggtgtgcaccaccacgtctggctaatttttgtatttttagtagagatggggtttcaccacgttggccaagctggtctcaaactcctgacctcaggtgatccacccaccttggcctcccaaagtgctggaattatgggcatgagccactgtgcctggctggccttctttcccttccctgtttgctttcccactccctactggtgctcccgagcatcacctgcaaaatgatcaaggagttcattcttaggtcagggaatccattctgaggtcaggaagtccattctgagttcagaaagttcattctgaggtcagagagttcattcctaggtcagggagtccattcttaggtcggggaatccattctgaggtcagggagttcattctgagttcagagagttcattctgagttcagagagttcattctgaggtcagagagtccattctgaggtcagggagtccattctgaggtcagggagttcattctgaggtcggggagttcattctgaggtcaagggtccattctgatggcagaaagttcattcttaagtaaagaagttcattctgaggtcaggcagttcattcctaggtcaggaagttcctgtttaggttggggagtctattattaggtcaggggattcatgcttgggtcaggaagtttattcttaggttgaagagtctattcttaggttagggaatccattattgcttcgggagttcattctcaggttggaggttcattcttaggtgggggatttattcttaggtcagggggtccattctgaggtcagagagtctattctgaggtcagggaatccattctgaggtcagaaagttcattcttaggcccaggaattcattctgaggtcagagagtttattctaatgttggggagtccatcctgaggtgggggggggtcctattcttaggtcagggggtccattctgagatcaggaagctctaacctaaaacagtctttagctggaatcccagtgtggccacttagtagctgagtggtcttgagtaagtcaggacctccaggtccacatgatgatcccaccaggtaggctcattccctgggcaaatctcactactcagcacctgctctgtagcagagatcctgagagtgcccatgtgtggtgggtgctcagtgtcctcttcagattctgctccaaggccagggtaccccttccacactggtggctgagcgccttctgcatcctcaccaaaccccccgctggtctaatgagcagcctatggaagggacacggggaacccttgcttcaactctgcaggtttccaaagctccaagctccccaggggccagtggaggcctctgttgcagcagcatcaaagccccactgctctcttacccttcccaggtgggactcccaagatcccctccccaacgaacccctacatgcaaatctccatctcagggtctgtttctaggggactcaacctgagacgtacttcataatgttgctgcaatcatctaggacagaataatcataaatagcaaagctctgaaaaatgttaaaacgtaagtagtagcagtagtagcagcagcagcagcagcagcagcagcagcagtagtagtagcagcagtagtagtagtagtattttgttattgtcaacattctcatcatgagggtcttatggcctggactctggcctgtgggtctcaaccctcccatggcctcctgcaaccatctctcccctacccctccatagcacatagccttatagattaaaatgttcctaatggcccccaaactggttgtggctcccccagtgcttgggggatttcagaggggctgggtaacagtttggcttctgcagccatttctgaatttcacttttggtttgttcatgctgtgctgatgcttcaagagttgaccacaaagtagccaccagtcaccaaagtggcacaggctggcctgagggtcatgagccgacccactgggccatgagtaacagaggcaagctggctacttggcttcccctcacatttcaaacccgttaagccaggcaggggtgtgggcacgctgaaagaacgttcttgttctcaatctcttttaactggtgatgccaagaagaaacttaaaaaaaaaaaaaaaactgaccaggcgcagtggctcaagcctgtaatcccagcactttgggaggctgaggcgggtggatcacttgaggtcaggagttcgagaccagcctggccaacatggtgaaaccccgtctctactaaaaatacaaaaattacctgggcatggtggcaggcgcctgtactcccagctactcaggaggctgaggcaggagaatcacttgaacccgggaggtggaggttgcagtgagccgagatcatgccactgcactccagcctgggcgacaagaaaaagactctgtcataaataaacaaatatataaataaattaataaaataaaataaaataaaataaaactgagttgggccaatgtgcagcttgaggcagtatttctctgagccctttgttctctaaggataaatcttccgaagagcggccctcacatgggtggtccagatgaggcagaagaatagggtctggaggcagggaacctaaggccatttcaagctgacttcctagtactaaattcaaagtaaagccctaactttccacaccttagtaacaaaaagatcagaaatcactccctttgcaaaccctcaccttttctgtgcagcagatgcgaaactgaaaatacctctgattggttgctttgtgcaaccaatcagatgttgcataggagcgtaactttgtaacttcacttcagcctctgattggttgcagaaagcaggccgccacttcatttacaccgggtgaacaccaagtggccaatgggaaacctctaaggggcatttggactctgtagattctatatcctggaccttgagctgctgctccacccattcccacactgtggagtgtactttcattttcaataaatatctgtttttgctctttcattgcttcattctttccttgctttgctgtgcattttatctaattctttgttcaaaacaccaagaacctggacaacttgcagtcaagaccaagaccgtctactgataacacaggtcagatacttcacagcctgctactgagggatgctgtggagcttccagggcccaggatccttgttggatccacaactttccaagtggccctcagcactctgtgacccccacgtggcagcctcctcccaggagagacttctagcctgtattagcttcatgccagcctccctgtgtggctgttcatacaatatgatggctgtgttccttacccaaagcctctgttccccatgggcaggaatgcccttggaagaggagcaccagcgggggacaggccagacacagggcagcaacctcattaaatctcatccttagggtctttgctttctctcatttggcacttctacccaaatctagtcccactgctagatcctgagaagacacccatttttacatgccacagagcactttccagcacattattcttcctctgagccccctggggtagcttgggtttggcatgctgacccagcaccccatcctttatctgggatctgagttgtctccactagtcacagaggtagttgcaagaatgggcctcaccaattaaattacttcatgcactgtcacagcttagtgcttgctgccaactctggctgcataataaatatgcatttgaaaagggcacagcagagcctgctgaaggctcatccattgcacatctgacaactgatgtttgctgtcactggggcctcactcagctcctccccaaataggcctgtccatgtcctctttccagctggcctagtccaggtttcctcacagcatggtagctgcattcaagggtgagcagagagagacagaggtatggggagttggagggagagagagagagagaggaaaaaaaagaagagggagtgagcacaggtgagctgagtggaacctgcatcaccttctatgacctagcctgggaactcctctcttcccagattaaacgggaggaacatagacgccacctctcagtgagagcaatgtcagtcatgttgttagagcaggaggtctgggacatctttaattgttcagacgcctttgggcaatgcaatctgccaccagtgacatgcactcagtacctacctgaagtcaggtaccatgtgtgcatcaggtcatagcaaccctttgatcttgccaaagccttgaggcagattaacttgcccaagatcatgcagctggtaagtggcagagccagcatttgaactgaggattctcagctccagaggtttctatggacttgagtttgttctcataaattttgagaggtaattgcattccttatatataaaaaggaacaaggcaaaaagtacaatagaagaacagaatactagaaaaaaggaccagtcaggaacatgagatcatgaaagtaagcttagaaaataaagatataattggccagataaggcaaataataagtcaatagaaaggatacacaataaagttatttgtttgtttttaattcccagggcacaggcaaaaaaaaaaaaaaaaaaaaaaaaagaaagcaagcaagcaagagagaggccaaaattgcaaaaacaagagaaagaggagagaaagtaaatgggggaaagccataaaaaaaatagaataacttttccagaggatgaaggaaacccatacagactggaaaggtccaaggatcattagggagtgactccaggggtaaagggcttttcaagcaatgaggggtgctctggaaaggctggcccatgagatgaagggattaaggcacattattttgtcaacagcaaaagcaacaaagacaaaaacaattaggaattccaagaaaaacaagatcctgttccataaagatatagccgaatagaaagtaaactaaaataagcatggtgtaaggagggttggaaaagagaaggctgtacactggactttgaatctgggaaagtcaccctttagggggtacagacatcgtgggagagaacagagcaagtcctacatgtgtgtgtttctatagtaatcaacagttaggcctaatagtgaaaatgcttcttatttcttttcaatgcttagactcaatctagacaaagaataaacctaatcatcgctgtagaacagaaggtaaatgtagtcatccttgatgctgtaaatgtgaagacagtttttaccatattatctagaattagttttgatggcatctaactgatgagctcaaaatgatgtaaacaaaatagacttgtagttctcacttgcctaaaagagaacttatcatagctctatgaaataaagggagccaagtccttccaccctcctctctaccatccctaggatctggcccacatctgcatggtccaaaatagcagccaaagtgccagccatcacatctgcatttcaagcagttgaatgaagacatgggagatggcctagcctccctagttttaggaagtcccacacaacacttcaaactacatctcatcaaccagatgaggtatatgccacagctagtgggagagaaagtaggaagcatggtcttcaggctgagtggccacacgcaagtcagggttctatttccacaggtggaggagagcatggaggtgacagcagctcaagggttagtcacagagatgggacttaggaagagatggttgagagaactgttatccccgtccgagagggcagagagttagacaacagtctctatcattgatggaataagaagcagagaggaattacatatttaaagctataaaggtcatcactagaactaaatctaatgaaattagctaagagactattttgtaagattccattgtaatagtcattgaagattgtccaaaattgataagtcaagcaattgaattacaagctcattatttagaattacagaggtaactgccaaaagaacaaaaacataggaacagttgcaagtgtttaccccacgagcctgaatgcgagggaaagcaaggggcaggacaagaggtacctgctctccttacaaaccttctatgctcttggatctctgtaccacgagttggaactttggcttaaatttttaaattaaattaatgcagcctctgcttccactcgaggctggggacagaagagagaaccacttggcctgttgctgacagctgccatcccccatccccatgaagacagggccctcaaggaatgcagagggcaaggctggggaggcttggggcatggccagctctcctgtcagggtgcccctttccaactcagcagggatgagaatcctcatcacccggagtgccctccaggggcccacagctgggagcaggaagggatactgggaatattccacctgggatgacactctgatgtcacgggagaaggggtagggtcgtggggaggggcaggatcttctcgatgcccccacccctcgctggtcataggcactggctggcaagaacgggctgcctggggccttgcgccggcaccctgagctgatcccccacatgccatcgcggtcatcccattgtacactgtgcattcatcgcctcggaaccatcccgggacaaagtgccaaagtcagccattagaccaaaatgctcaccaggaagcatttttgagacagtacctcagaatttgaaatagaaccacactaaaagctgtgctgctttggagaggcagagacctctgctttcccaaaccgtttctaaaatatcctagagaaaaacaaaaaagcctctctgagcagccacctgtcaagacaaaggagattatcttggactttttaaatgccctatgtttgatatagggaaggaacactttggtttcttgatcagaaaaggtgtcactcagatcctgtctacaacgcaagcagagcggctcttgtcaaaggctagaccaccctcgtgtggctgcttctgtgaatggcaattcagatttgaagagcaagacagatcagacagcttcaaaagcgggaaaactggctgggcgcagtggctcatgcctgtaatcccaacattttgggaggccgaagcgggcagatcacctgaggtcaggagtttgagatcagcctggccaacacggcgaaaccccatctccactaaaaatagaaaaattagctgggcaaggtggcacatgcctgtagtctcagctactcgggaggctcaggcacaagaattgcttgaacccaggaggtggaggttgcagtgagctgagatcacgccactgcactgcaacctggcaacagagcgagactccgtctcaaaaaaaaaaaaaaaaaaaggaaaactaagctcaacagtcaaggctgaactaattgcagaagagtgtaaaataataatttacttcattaaaaaagctgcagagcacttttcaacccaggctacttttattctctagtcaagagcagttgttttcaaagtgtggtcccggctttccagtatgactagaaattggttagaaatgcaaattctggcctcccttggccctgctatgtctgaaactttgaagctaaggctctggcaccctagtgttagcaaggattctgacgctccctcactttgagaactgtagtttgcattagatttgttactgtctggcaccaaaagagagctgttagccaaggcattgacccttcaagggaccaggaaaacccatctagacattcttcaggtgtttcaacagtgagagaaagtcctttctttgctccctagcttagacagagtccccagcagcagcccctgagacaacaattgcactgcaagccacttatttgagaggtgatcccaggggcacctgttggggtatggggatgtgaggtagggcagggggaagccagtacaggggcagcactgcaggtgcctggctcagtccctggggagctccgggatgatgcggggtgtgcctcagagatgtcctgcctgagggactggaagggttggaaccctccaattcccatctgtccttactgaaggatgctcttgggtgttaactctgggcattcctgccctgccatgagtaaggtccaagactgtggccagaaaaccctggtctggaaaggagtgaagagggtatctcactgtctgctccactcagctttcccaggctgcagggggagacaaaaagtgcttgccgctcacttctgagctctcaagactctttgattccttattcaaagcccactcatcaatcaaggcctctctcaagtcccatctttgccaagcacctcagcatctcccacttgggagcagcctctctccgcacacagaccagccctcagatccatgcatcactaaaacgtctctgctgatgctgggcaaaccagggcctcgccctgggcccacacggcctggccgaacactggggagagagcgagaaatgaatgccacaaaaggggcacaggaatgttcagaggggggaacaccacagacctttccacaaagtgggatggctgtaaagagaaggtggcatctgagccagtccctgaaggatagcggaaatgtgtgcagaaatgggggcaaggtacacaaggcagagagggcagcctaaggactgcggcaagcagcatggattccgcgtggccgaaacatggcacgggggagaatggtgggaacccagctcatgtcttattatggagggcctcgggtctgggaccctagtctaggatatggggagctcacaagtagggatactgcagagtgagagttgtgccccaggcaagtccctttgaggagcatgtgtgtttcaggaccagaaaagtcagtgacccgttaagagaggaagagaagatgggagtggagttggggtaattgtgccacaagagctgcacccactactcaggcattcttcaggtatccacatgccaacatcagggagcaggtaccctgattttacaggctcagagggttagatcattcacaggaggtcacgcaggtctatctgactccaagttcgcatgctctttctgctctatccaccaggattgttcaaatggccccagagaaagacagctgagcccaaactccagacccacagtaggagctgcaggggcataagcgactcagcaaggctgaagtaagtgtgagcctcagagcatgagaggaatggctggccccagcccccagtcctgaatcaggaggaagggacacagacactggccccagccctcagctctcagagtcaggaggaagggacatatggcagctaggagacaaagcatctagaagcagaggaacccagtggccatgaggtcacgaaagtcacctccagtcacttggaccagaagacatgcctttgggcagctggcatgtcaactgagcctcgaggaaagagaattttttttttctgtttaataatttcttgaggtgaagtttatataaaatgggctattttaatgcaaacaattcaacggcttttagcagtttcacaatatcgtccaacctctatcagttccagaacattttcatgactcaaaagcctggtacccatgaagctgcttctccccgttcctccctgcccacagcccctggcaaacatcattcggcattctctctgcagattcacctattctggatattccacagaaatggaatcctacaacaggtgacttctgtgtatggcttctttcaccatgttttcaaggttcatctacattgcagcatgtatcagtacttcatttatttttatttattttagaaatggggtttctgttgtccaggctgcagtgcagtggcataatcatcgctcactgcagccttgaactcctgagctctagagatcctcctacattatcttcccaaatagctagtactacaggtgtgacccaccacagctagcaagttttttttattttttgtagaggctaggtctcatgatgttgcccaggctggtgtggaactcctggccccaagcaatcctcctgcgtcagcctctcaaagcactgggactacaggcataagccaccacacctggccagtactttatttttcatggctgaataatattccattgtatgggtataccacattttgtttattcattcatccattggacatttggattgtttttaatttttggctattatgaacaatcatgaacaaatactcacttgagtacctattttcaattcttttgggtatttacctagaagtagaattgctaggtcatatggcagttctatgctgaattttttttggactcatcgtacagttttttacagtaactgaaccattttacattcccaccagcgatgcacaagggttccaatttccccacattctcaccaacatttgttattttctattttttgattctaggcatcctaagattgcagaatggcacctcattggggttttgatttgcatgtccagagaagggcattcctggtaaacaaagcagcacaggccattttacaaggccatcattccctaagagcctagtgtttataagtgtcatgccctcagctcgaagctcagctcgagagcagggatcatacatcttacctttcctttgtgtcatcagctttgagcacccatggcttaatgaggttcacagcccctttccactcagatctacagttggcctacatggttgggtcaataggaatagccacctccgaggctatgcccaaggtcaccacggggttgcttgtgaagtacactgaatgtgctgggtcctccagaagctgcttgtggagccacttaaaatgcctgctatgattgacaccttcagtgcctgtctgaggcctggtacttcccttttcagggggctctagctgatttccaaatgcctaagggctttttttccaggccagtggaagaaaagcttctctgtccctcttgccagacaagaaaacgacacctccccggcagccctcactctcaggagttgtgtgtaaattccacagttcccacacgctcctggccctccagggggaataattctgaagcatatgttctatgctgttctatgaggagctgcacagcgtgatgaggatccagtcacccacagtggtagcagcctgggtaatctactcctcacccatcccaattccctacacccctttgcctagcaaaccaatgacttgcaccaaaatacttgcttcggatcagcttctcggggaatccaaactaagacatgtaccatgtgctaagcacttcctacacagtaatttataaaactggcttagaagcagagaaataacagtgtccctgagagttaaaagtcaataagacttggaacatacctatgcaatgtcacctttaagagaaaagagattcccagcccatgaggtgaacaaattaaaatatccaccaccagaatgtggaaacgcccaaaaaaaggggtagggtaattcacaggggcaaatgtgggcagggctggtgagaagggaatgtggtcaccagactcactgtggggtatctggtctccctggtgaccatgttccttcctgagaacatagatccttcaggccctgtcaacttgtgcccttggccactgggatcatgccatctactgtgtttccttgttctgacccatgctcttatagccacctgcacctgctcacatagagagcacatgaacacatgctgcttagtccctgggaagttggttctggctgtagatgaaccaaccaacacctgctctggagtgcagccttgtgagcttcctcctgtgactggtcctagccaatggacccattttcagaaatcaggacaaagccagcctcaggactgtggtgagttcgttgaggtggcgtcactacgtaaggccttgaggggccttcttttcttttctttttttgagatggagtctcgtcacccaggctggagtgcaatggcatggtctcagctcactgcaacctccgcctcccgggttcaagcaattctcctgcctcagcctcctgagcaagctgggattacaggtacctgccaccactcacggctaatttttgtatgtttagtagagacaaggtttcaccatgttggccaggctggtctcaaactcctgacctcatgatgtgcccacctcggcctcccaaagtgctgggattacaggcatgagccatcgcacccagccaaggggccctattttcaaggttccattagcagcaagtggcaaacccaggtcagacataaattaaaaaggagttattgccagcactaggctattccctggaaccttggggcaggaccacagcaaggacttggagaaggaaagtaatgagtaagaactctgtcttgctgcatagcagaccactacaaaacttagtgggttagcatgacaacaatcatttattttgcccacaaatctgcagtttgggtggggcaaggcagggtaggctcatttctcttcaagccttgccaacctaggaccacggtggttcacacaagccacacaactggctactgggcacgcgttgctgtggggtggctcagctggagttgggctttgcttgcagcacagcactgggctccaggcacatgtatagctagagagcagcaccggctgtatctccttttacaggccaaccttggcagacatgtaacaccatttagcctgagctcacacagtcacaaaggcctccctgatcaagggaaggactcaacaccatgtcctgacagcgggtggcaaggtaaggttccagatgaggacatgggaccagaaatttattttgtgtccattttcagaaaatgtaatccatcatagtaaggaatcaaggcaaccattctccatagctcgtgtgtacgcatgtgtacatgtaagtgtgcatgtgtacatgtaagtgtgcatatgtgagtgtccatgtgtgcatgtgtgtgtgcatacatgtcttgctccagttctctcctctggtcacatgaccttgacctctgcttcatcctctgtctgtgctcatggcctcagttattcctgccttctcagaatcccccgcttcctttgggaacagctcctccacattacttcttttgagaaacttcctccccaggtgtttttggcaggactgtccctcaagccacccatccctcctgggcagcagaggggtggcacatgactgaagttgggccaatccaactctctcctgagaatctgactttagtggagaatcccaggttctagacactggtcacagctctgtcagtccaactcagcctctgaggcatccattgcccagttcttgttcccagactaaaagagccaccttaccagtgccttctgtagactctgcaagcatcctgcagtcttccattaaatactgataaatatgtgtatttagttccaattccacatagaggctttgcagccgtctgacctctcccacaattccagatggctggtggctgagctgggaagagggctgagattcaaaccagaaatgatccctacaaccttctcagacaaacggcatcattgcaggctggacaaatgctccagatggtgcctcctttatacactgccatttaatgtctacagtgtccacacccccattttacagaggcagtaactgaagtacagagaaggcagagctcagatttcacaaaactctgtctaaccccatagggtttgctccttcagtaaacctcagaatctcctcaaaagtcaggtccccaactgccctcctggaaaagcagccccagctcactctgaactggcagtggctcagatgatcctgctaaggctgagagacggaaaagaaagtgtttttggtggcagtacattagagtcacaactgctttgctgtcaccgtagattgactggctccaagtcatgcagcctctcatggcaaacaaatgctgttaagatcctgcgccagagaacaacattgacaatgagggaaaagatcaatcctctatttacagacttaaagatccttaaatcaagcctgtcatcagagctgccaaggactctgcctgtgtgaccagatgtgcccttcctccctggacggactccacgctgcacatgggaccactgggctcatcttcagaagggcccatgcaatttggtgacaaatcccaccaatttgtcaatacacttcttccaagtttaaaagccagtcattggagggattgttggcaaataaggaagttgctatagatgcaaaatgtcaaagcatgattctgctttcccaacgctttctggatgctacttcatgctcggccccatatgaagcacttagcatgcattgtttcgttcgctcttcacgtcagcccgaggagatggatatgaccattgcccctattctacagaggaggcagctgagcctcaaagaggctaactcacttgccacagccaccctgctaatgcttaagccacactagtcaggttgcaaataactttatgcttatgcccaattttaaatagtacaaaagataaaaggatttcctggctcttgaaactgaaaagtccaaacttgagggatgatttgactcccaacatagtcatcaagagcctgatttcttcccagctttcctgtctgcctcatcaagggtctaccactcagggcagcaagatggctgcaacagtgctatccacacactgtgagtccagaagggaagggagaaaaatctccttccccagaatccttcagcaaacacctccaggctcagtggccctaattgggcctccgaccaccctcagctgtgctcaacgcatacagtgccagtcgtgtgtcctttggaaccagggatgtctctgacctccccaaactccaggatcatagtaagggaggagaccacccctcatattgtcttatgcccaatttctgcctccaaagaaaaaagtagtaaaaactaaaaggcagaaatgaaatccacaagcagacagcccagcgccacaccctgggcctggtaaagattgactcctgacctaattggttgtttgcataaaaaaggcactgtgaagatccctgtcctgtcctgttccgttctaattacctgtgcatgcagccccagtcacatacccactgcttgctcaattgatcatgaccctctcacgtggacccccttagagttgtgagcccttaaaagggacaggaattgctcacttggggagttcggttgttggagacgtgagtcttgctgaagttccctggccgaataaagcccttccttctttaacttggtttctgaggggttttgtctgcggcttgtcctgctacaaatagggggaataaaagccagggttgcttccaaagagagcagggagtgagtgttgaggacagatcatcacaactgtgcagttgaggagcatgatttgaacccaggtttgtctgttcattcaaacagtatttattgagcccttgctttgggtcaggcacaattttatatgctggagacacaaacctaaaaggaccctaacctaaaaggcagaccccacaaacctaaaaggcagaacagctgcctttcaaagctaaagtctcgcatttttaaaaggccttggagctgcattaatgttcttctaatttttctaggtatgaatcttcatacttttctaggtatgaatcgaccctgtgacaccaggatggttctttgtcagcctccttgtctataaaatcagaaataatggtacctcccccaataagttatgtgaaacaaattaaaggggcttattatacaggaaacaaaagcagcacagcatccaaactactgagcgtgcagtaaatcaacgcattcccacttccattccatccacgctgatttagatcaatccaagtatcactgccttggggttcaaaaggccatgttagttcacaaagccccgaaaatgctctttcacactctctgctcagcctccaacgtgtctttttaataatccaaactttccacctacttaactgaagtgtgtggggggagagggtgcgggggggaaggggtggcctatactaaatagcccaactgttttccacttgtcctgaaatctgagaccaagattctcttaggaatgcaagcaaagggagccgacgggacgccaagaaagcacaggttaaactacctcacttcatctagccccatttctctcctggcttttcaattaattattcagcctcagaccagcagatggagctgaaaatgttgtctaaagaaatgaggtttttcttttaatttacaagctatagtttctcatgcctccacactgaatggttacatcctgttgagcctgttcgtaaagttcagtaaaaatccagttctcattccagaacagctgaatcgtagctatgaacgcggaagaacagagtcccaaccccagccgggcccgggtttcccggggcccctcaagcctcagggcagtggagagccgccgtcacgcccccgcctcccccacgtcccaccctcgccccagtctcctcccacttttagctacttttcccatctgactaaaactggcttcctccgtgtccaccaagatgtcgcctctaagtggcctaactcctaaagagcgcgatcggctcaagcactccgccacgcggtttccacggggcgcggccggcgttgccctcgccgtggcctcaagcattgcggcgccccacatgttgccagacggaaggcctcggcggggtcaggcagctgctgctggccgtgactacatcactggtgacgtttcacgagacttttaactgaaatcactccaatacaggcgcatgcgggacgaggggaaagcatctcacccgaccccacacaccttcccctccctctccagcctagcggcctccgctcagcggaaaaaaaagcagacgctactccccgctctaggtgcgggacctaagaggtttggcccaatcaggcatcccacctaaccagacgggccggagtctgtggcccggttggaccaacgaaaactctagggcggatttgccgggatttctgggaaagtgacactcccggaagctaccgcctcttataagccacacatgggcggagttagccttccggcccgcagtcccactggctgacttcgctgcccgtcacgggaatgcgggagagggcggcgccggggcgctcgcgtctgcgtggagaccggctggccgcgcgcgggaagccgcggaactgcgccggaaagtcccccggctctggggccccggtgacccagagtaagcctccaagaaggaggaggaggagagaaaggcggctcttcccgtgcccctaccagaggcttcggtgggcccaccttgtgacctccgcggccggcccctcagtggaactgcgtcccacgcggggggcgtcccgaccgtgggggccgcggcccgcgctgaccctggacgtcgccgcgcaggtacgttgccgtcccccggcggtctgacccccgagacagcccctagtgcataccccacgccctcctccattgtcgagaatgagacacggctgtgcctttgtccacgtggtagagttgccgccgcggtgaggctctcgcctgtgcaaaaagcgtggcagcgaattctcatcaacgaggggaggcgcgtcccctcacagcgcagctctcgggtctgaggagggccgggcagggcgtgcgtctgtctaggtttgaattaaaggcgactcacaggaaataaggccatgccactgtggtagcttttcccgtccatctccggacactcgacggtgtgggtcgtgcgaggaggcggcagtcttcacagcctcttactctagtcctcacggtcaggttctttttctgatttgacacagacagcgggactgacgacctcataggtagctgaaaaccgtaagtggagatggtccttctatggtgtgtgggggcgtggccagttgttagattgtgtttggaaagacagccaggggcggagaagaggggcatttctgagatgatggggggactggtgccatggagggaggaggagtgaggtggagatcgggaattccagccaaagagaaatggggtccctgggagaaaattcccactctagcagtcctggagttgtgctcatggagacttgcttacgcgagtacaaggacagcgttgtattgacaaaatttcagccctcagtctagtcttgtaaacgatagatcaggagtgtacttaaccgtcgttactttgatccagccctaggtttcccttttctcatttgtaaaattgttatagtaatacctttttcatccatttgtggtaacatttaaatgaggtaatttgtgtgaagcccttagcaaacacagcgcttcttagtcgtgggttccgcgtggggtggattcaaccaacctcaaatcaaaaatattcttcagaaaaagaaaaatgcgtttgtactgaacatgtagaggctttttttttcttgtcattatttcctaaactatacagtataacaactatttacatcccatctacattgtattaggtattataagttacctacagatgatgaaggtatataggaggatgctgcgcataggttatatcaaacagtacaccattttatcagggacttgagcatctgcaggtgttggtatcctcgggggtcctgaatccagttcctcacagataccgagggaccactgtactcagtccagagtacagttgaggcttaactatgaggtctgtggagggcgtggaaagacccacgtctgaaattggctcttaactgctcatttttaggacagcttccctcccagccagccctttaccagaggcaatgcaccatctttgcagccgttataagtacctggctctttccagccctatgtggaatgttttatttatttcataagctaatcattataaaaaaaaaagtcttttttttgaaatgaaaaaaaactgttcactaagtttgtaagtataaactattttagtaatgtcctctattttagtaatgtcctcttttttttaagtgaaatattttaattatggagaaaagaacataacagttgtacctgtaccctgaaaaaagtaaatgtcaattttttaaatgcttttggacttttttatttgggggacaatgtgacatttcagctatagttcatattctgtgtccacacacccaagagctttgaaatctaacatgcctttctgtggaggcactgtgactccacaggacttatctggtggatgttagtacctgtgtaagctgggtgtcctcccttctaatccccactcacccaagaggtttgctgcttctagcttatcatggggattatggctgccattttgattctgtcctcatgtcatttgtgtttctaccctcttaagaaacctgccttctctgccttcccagttcctcctgagtgagctcatgatagactttcctagactcagcagctgacgagcatttcattggtttggttggcctttattgggccagtgaccactcttcccttcaacatggtccactgtctttaccaaggggctgtcatgtctgttgcaagcattcaggaaagagtggccttccatactcaaatgtactctattttataaaatgtgattttaaaaattcgtggtccaatcaggcctccttatcctctgggaattgattccagcagcccccctagccccacaacagaccaaatctgctgatgctccaagtccttgatataaaatggcgttaaggccgggcatggtggctcatgcctgtaatcccagcactttggggggccgaggcaggcagatcacctgaggtcaggagtttgagaccagactggccaacatggcgaaaccctgtctctattaaaaatacaaaagttagccaggcgtggtggcgggcatctgtattcccagctacttgggaggctgaggcaagaaaatcgcttgaagctgggaggcaggtgttgcagtgagccgaggtcgcgccactgcactccagcctgggtgataaagtgagactgtcacaaaaacaaaatggcatagcacagtcagcccaacgtatttgcaggtttcgccctgaggttggctgaatctgtggatgcaaaaccctcagatatggagtgctgactataactaaatgtttttaaactaaacacttaaggtatactatctcagtttgccacagtggtaatcccatcttaacagtgagcaaactgagtcttagtaaaattaggcatttttaggcattgggtactatttgagcctacagtcattgttctgcagtctgtaactattttgccagtagtagaaaaggaggaatgttccattgtcagggcagaatgaactttggcattcacgtggcttctcttcaaccttacttccctgcagcccctggttccccaaggcagaggaaataccctggtggagccctccttccatagaaccagagatggcatctgtggatttcaagacctatgtggatcaggcctgcagagctgctgaggagtttgtcaatgtctactacaccaccatggataagcggcggcgtttgctgtcccgcctgtacatgggcacagccaccctggtctggaatggcaatgctgtttcaggacaagaatccttgagtgagttttttgaaatgttgccttccagcgagttccaaatcagcgtggtagactgccagcctgttcatgatgaagccacaccaagccagaccacggtccttgttgtcatctgtggatcagtgaagtttgaggggaacaaacaacgggacttcaaccagaacttcatcctgaccgcccaggcctcacccagcaacacagtgtggaagatcgcaagtgactgcttccgcttccaggactgggccagctagtgggggtggcagaggtctctttgcttcattcagccctagctctgtagagaaatgcaaacctcgactctcaaggatgtgaggaacacaagttcatttctgttgttgcggagacactgcagactccactgtgccgaggttgaactcttttttgttgctcaagttctaggagtccctttcctgaatatatacttgtttgtcatagtttccttttcaaagtagtaaacttttctatttttctacttgcccagtagagactctgattctggaaattctgacaaataatttaataatacacatgttgcttctttccctgtctgatgtgtttgaccaggttgtgagggaggaggagggctaaaggcagaaagcataataggaagcacccgcacaggggtgaggatcagggcttagtacctaccccaggcaccagtgtgcacatagttggcccacctggagctgtgattcacagccccatgcacactagaatcccttgggacactgaaaattacctatgccaaggccatactccagacccaaccatgcttgagtgtgtgtgtgtgtgtgtgtgtgtgtgtgtgtgtgtgtgtgtgtgtgtggtggtgggtaggggggttggttttgttccaggctggagtgcagtggcataatcttggctcactgcaacctccatctcccgggttctaacaattctcgtgcctaagcctcctgagtagctgggattgcaggcacatgccaccacacccggctaattgtttgcctgaatctttgaggatacggctgggcatgggcagtttctaaaagcaccctaggtgtcttttaggatacatcaccttaggatatagcagaatcacctaacagatggctgggccctaccttagcaccttagctgagaattaaatgatgagaacagatgaaatactagagttagctaattgcttataaatgaagccactatattaaactcattgataaagagaaagtgaatcagcactgattctgagaggaagaagcactgaaactaggatggaggacatcagaaccagaagctgctgttactgatcctaaaggccaaacccaattgcatttcttcaatgtaaagaatagaaaaccctatagaagttggaccaatagatgatgtgcctgccatgctgcagcttccccagttaagttgtctttggtaaaagtgtgctaggtttgggatagggtagtcaagatactgcaatgggaaattttgagaagggtaagaatcctgataagcacagtgacacaggtagccgtttcctcttgacaccccttcccttctctattatctgaagcccagtgttttgagagataagggacccaccttaaatacttgactttctcattcaatttgtagctaggtctgacatgtgattaagttctggccaatgaagtaggactgaacttgggggaattttccttcaacagacccttctttctttcccactctatcctgctgcctggaaaggttatgctgacctgaccacgggctctggctcagtcttggccaagagaacagctcagccataccctagacgtaggatagtgctgagctaaaaggagcctaggtcccatgtggaaacaccaaaatagccccagctcactcaaccaaagacttctttttaaatgagaaatcccatcttaagccattatcaatttggggtgtgtgacactgacacacagcagtaatcctaagtgaggaaaaggatttgaatggggcagactgtattcactacagggcccagaagacgcggggacggccccaactactgcccttcaggtccgggccagacccgcaatgggcaggatgggtagggtacagggcgtgcgtccccacctacactagcctggttgcaggcggcctccaagggcacagcgggaagctccgcccttgccatgcccccgccaccggggaaggcaagacaaatgtgcgtggcaccctcctccttcggttctgggacacatctccaccaagcggccgttcggcaggtagggccagatggtcccggctcgtccctgcgggtggggtttcccaccggcggaaagcgcaagcccctcccgttctgtccagcgcgctgcccgctgccttaattataaggcagatgaaggtgaaaagtttactggtttttatttttgcaactttttgtaaattttaaattattctaaaaagtttaagaaatgaattgtgctgaggagtataatcagcacgcagtgcgagttcttatagtggccacgtccacaaaccctgtgttgtggaagaacagaaggcgttctgctttctgtgtttcaccgtctctccctcgctttaacttccaggtcccggagtagtggtgacagcaaggtctgttggtttctttggtttaggtttgatgaaaggccactccagtggggtaggaggtgggcagggagaacaggggctagggtgggaggggcaggagttgggtcctgggggtggaggagatgacggggagagtggcttggagaaatctgcaagaagagacattggaaggccgggggaggtgaaatggacactgggtgaagctgaggagtcctagtgaaccatgttacctctgatccagatattcccagaacaacaagaaatcaagcttctgaatgtggtctgttgcaagcttggaaggtgcacacctgttgctgctaatttggacaatttgggggaagagcagagatttagatgttgctttggtcgaccttaaacaccagccctgtctcccctaccactttgccaaattagggccccgtctctctaaagagcaaacagaaaactgcagaaagttgctttgtcctgtagacaagaggctgggactaggtaagaggagggagccaggatgcaaaacttaagaccagcctggccaacaaggcgaaaccccgtttctactaaaaatagaaaaattagctgggcgtggtggcaggcgcctgtaatcccagctactcaggaagctgaggcaggacaatcgcttgaacccaggaggcggaggttgtagtcagccaagatcgcgccactgcattccagtctgggcgacagagcgagactccgtaacaaaaaacaaacaaacaaacaaaaaatcttaaacatcaccaacgagccttgtgagaaatggtttaacgttgtgataccttgcccaattttaaggcaggtaaaggtgtgtgttaaaactcaactcttgaactgaaccccagctgccctttagggcatgcttaatttgatgtggactgtaacctcttttgcagcattgtagagatttggaatctgcacattaggaagagaccccacgaggcggtggcgttctttctcgttcggagctcacacccctcctggggagccctctcccaacccgggctcccggtaagcgcggtcgccgctcctctgagggctgctcttccctcgcttctgagccgaggcccccgcgacacgaacgccacgcccgaagcgctcttgccaggacgtactgaccgagggtaggctgcccagccgggtggtaacgttgaggaaaggacagcagcttcgcaaaggagctgggtaaaaccacgcccagaccccgctggccaccagcccgagaccaagacgcaggcggtggcgccggtttctcactcaaccgcaggttccagcatccccgatacggccgacgtcattaccctgcgaccgctcaggacacttctgaggactcttttgacagctagtaatcgcgcggtggcgcgaccacgtgactccggcgccctagccccgccctccgtctccaaggagccctggaaggagctataccagcggctccagaaggcggggagaggcggggccggactccgggacagccaatgggcgaggagtgccgcccagcctgacccaccggccgctccctcacgagcctgtgggcgtgcgccggctgtgcaggtgaggggcagcgagggcgcctagtgggcagggcgccggcgttgcgcgtgcgtcagtgttcttccttgtgcagtttagaatttgatacatttctttccagtctatttctatagatttgttttcaaatcacatcagaccctatgtaaaatagtgtaccgtctttactcattataacatggtgagcatttccccaagctattacacatatttttaaacattgttttaatgaccggcataataatccagtgcttggatatatcaaattcttcggccatctccttataggtgagattgtttccaaagtttcactaatgtaagtgcactgcagtgaacgcccttacgtaacaattgttcactcccgtgtacttttctcgtgcagagttctacagcatgaaacactatatttaactttgtcaggttgatgtttatcagtggtttattattgtttttatagtattccattgtcagtgaagtatgccattcacactgtcaagtgaattgtctatttgtattatttaaaaaaaagatcacaaacatagaaaggagagctttatttctttaaacggtgataacctgcaaggtggcccttctgacaggctgggaagcatagcttctggcagaagctcaaaaggcaggcagctggagggaagggggcctaagacaggaatttaagctgaaggacttagccaagtacacatatgaacaggccacaggaagagctatgaatattcatgaaacgggtcctgacccatgcttactggacaaacgtgcatgttacaggtgacctatgtttactttggggtggactcttagcatttacaggtattcatgtattacatttagaccctataagttgaaagatcttttcaggacaccgatgcacttgtgtgcagcctctgtaaaccgccagaatcagcccctgttcggttgtttcccatcaggaaaaagttactgcagtcagtctctggtccaatcaaagcagtaattatttgtggaagtggtggggctggggcagggggcgtgtcagtcagcatgtggaggtggatgaaaagcacattgtttgaatattgcttatctagaggccagtgcttgtttggctgccagagaataaaaaccttgtggcagttaaggcatagtttcttcttgaagtgtagaggtgcatgacaacccttgccaggcatggcccttcattctttatcatttagtattgccacaaagagtctgtgagtcttatgacctctatttttaaagctattaagacactcaactaaagcaatcctttcagtattgaatggataagctagcattatgttatgctagctaacataatcggagacggagtctcattctattgcccaggctggagtgcaatggcatgatcgaagctcactgcaacctccatctcctgggttcaagtgattctcctgcctcagcctcctgagcatctgggattacaagtgcctgtcaccactcccggctaatttggttttgtttttttgagacagagttttcctctgttgcccaggctggaatgcagtggtgcaatctccgctcactgcaacctctgcctcccatgttcaagcgattctcctgcctcagtctcctgaatagctgggattaaaggcatgtaccacctcgcccagctaatttttgtattattagcagggaaagggtttcaccatgttgtccaggctggtcttgaactcctgacctcaggtgatccgcccacttcagcctcccaaagtgctagaattacaggtgtgagccaccgcacctggcctaatttttgtattttagcagagacggggtttcaccatgttggccaggctggtcttcaactcctgacctcaagtgatcggcccgcctcggcctcccaaagtgctgggattacaggcgtgagccaccgtgcctgaccacctttttgtaatgcaaaacaaaatcataaaacacgattctgggcctgctggagccatgggtgaaaactgcgttcattccaatttcttcaaatcatggaatgcaaatatagagagtcggcctaagaaagatttctgtcactcattcattcttcaaatatttattgagcacctactatgtgtgggaagctggctcctgttcaggaaatataattaaaagtacaatctcccaaccctcttcagaaaggtagtggagaaagaaaacactttgtaattgaataagcattaaactagaatgtgatacccatcacaggcaatccattaagagactgcaaagacagaacgaaatctcactcttttgtgcagccaagcaatctattacacacattttcaagataaacaataactagctctcaagggaacttggcagcatttttcatcacacacagttcatctaacctgatatttgggatgatcctctgtgttagccaattggctttatctagaggaaaaagaaacttgtatctttatgatatgagataattttgtaagttggagcaaagggcccactgaagttaggctcctactcccccattaaaactgggagacaggggcattaactcccttgatacttaaagagatggctcctaggtcctagaaaaagacatatctaggttataaagcgcacaaaaaggcctaactagtcttcaaaaggatttatatatttcaaagagaggaaaaagtacttacactaattaccaattttctaaaagtaaatgttcgaagaaaaagggagggaaatctcatattttcaacaggaagtagtaaaccttattttaaatttgtatttgtcctgacagtccccaaacattacaaactcaacgtgtcggtaagacaaggctgagttaactgctggccacagtaagggacagcatgacctggcaaagctttaccaatggctgggagcaaaaggcaaggtcagtttattgagaactggaagtctgactcaaggaaggtgtttcaaagcgggctttagttagtattgagcaagaattggtggaaacagcaagatttcgaggagtcagcgaatcttagggaatcaattgtgctttccccgaagagtggatgggtctctggggaagttctgtagtgaacaaagctttcgcccgaatgggaactcctggaaataaagccctgcagtaaagacggcagggtgcggtcccggctcctggcgcgccgagccccccagcagggcgggggcaccgcggaagaagcgccccagaggagagcgccgcgccgagccccgcctggcgccagttctccagcgcccgtggaggcatctgcgcccctagtagccaaggtgagtaccagctccaagcccggctttccgcgaggtccctcgcgtggccaccgtgccctaagggtgcgctcggcctcggggacgtgagcagctcttagtgggaagccagctgcaggccctgaccgcaggctgctggggcccggaagcgctggcgccttgcggccagaagcccggaatggacgcgaaagtgaccacgcgaatctgacgctcacgtgacttttcgcgactggccccgcccccctgtggcgtgccgcagcgcagacgtcgctgtctcctgcgcaggcgcaggccttggctcgcggcgggtgacgcaatgcggcgggtgacgcaatccggcgtcgccagtcagtcgcgcggccagatcaggtaactgcccgaaccgctccgccgcccgacgtgtggctcagccccttcctcagccccgccaggggcggggccggccgcgggaggggaggggcctgcagcgaccaatcggcggtgcccgcgcagggtgctacgccacgcccagccgggccggccgttcctaccggcctggtccagcggacagcggctgcagcgggggcgccggctgggaggtgagtgcgcggcccgtaggcctggctccggcccctcgccgcccgccgccgcctctttgtccgcgcgccccggctgctctgtggacctgcgcgtctcggggatgcgggagcgggggcagggggcggcccgagggcctgatccacgcggccccggatgcccgcgtcgggaggcggcgcgtcgggccgaggaggggcttctctgtggctgcagtagtttgttctctgggtcgtctttggagtggccgagcggcgtccgggcgctggggcggccaagtggcgcgggaagggtgggaggtgccgtgagggcggcgaggacagcggcggatttaagccccactggaaaccccggcccttgtggccgtggactgggctgcgggtagcagcgtctcctggaagggctctggccccgtgagcctcggggattcaggggccgccgacgttggtgcagatgccgggcgcactgggaggcggccggaatgccaatgagattcggcggatacgcagctgtcaccggccgcagactgccctgtcgccacctccagtgcctgcactccagtagccaagcaacataggaaatcgcgctcagaacccactttgttgattgagaaatcaggtctcctcgagggccctgttggcagaggtctggggaagtcagggcatcaggctgagagagccctctgcagtcttgtttccccaggctggggctgggaccactgaaaccccagtggctctataagagccccactcttatagatcccttccttaggctttgtcagtgttctcacagttttactggggcgtctccttcaggcgacattgatcaagcctcataggtacctgtttacagcggaactcccagagggcagtcttttccatgtttgagggactgctagttgtggggagcggtctcattgatgagactggagaaggggagaggggtgggactagtttatcagggaagatgatgacaactttttttctagacacgttgaatccgaggtgacatctgtggtctggccgaaggaggctagaaggaaggcatgtgctttggatggatggaaacaggaatcaaagaggaaggtagattcaggagctgaagggcagggagaaaacacattcagggagtttgtggcaaagcagcagaaatgacgatggggtgacggtatctggaggccttaggtggggttggtgaaatttgcatgcccgctgcagtggaaagatttaggggctaaagatagccctttgcctttggcaaggctgaggggaagagtgtgttgagtagtctgagttgaatccgggcaccaggccctggctcatgtcccaaccagccattgactgttaccttgataggtcctcatctatgaaatggggatcactgtagcaccttggcctatgtgtgggaaaccaataaactagccaacaagtttcaggctcatggaaccctggtaacagccggtcagccttcttcagaggaggaaatgggttcagagaagttgcttgctcaaagtagcacagcttgtaaaagctgtggaacttaacattatttcagtagagtaacaataattcaaattctgaggagtttaggatgttgggaatgggcgatgaattgtgaactacttttccaagaagttttcctcatggaaagtagttatttagttggttcttttcaaaggcagaaatgattccctgaggttttggatttgctcccagatggtggtggctatgtgttttaattatctggtttcctgatcagagaactagacattattgttgccatgaattcttttacagttttggggactatgtaagcaaattagacagtgaccttggtgagcaaattactgtgttaatgtatttcactaatcacaacttccatcatttgtttatcactggaggaaaccttagaatacactatttttcatgccaatttattaccttaggaaaatgcatgaggaacctcactttagaaaactgctaagaagtaaaatgtcattcgaatctttacctgagtaaagctaggttgttaatgagtctatatcctctcaagtactgaaggaatcctcataaattttagtccttttgcatcagtggttgctcatgcataattcttgtttctttttcaaagctgtttttggaaggaagaaagatggaaagcggtgcagttctgctggaatccaaatcctccccatttaacctactgcatgagatgcatgagcttcgcctcctgggtcacctgtgtgacgtgacagtcagcgtggagtatcagggtgtccgcaaagacttcatggcccacaaggcagtgctggctgccaccagcaagttttttaaggaagtgttccttaatgagaagagtgtggatggtactaggactaatgtctacttaaatgaagtgcaggttgctgactttgcttcatttcttgagtttgtctacactgcaaaggtacaggtggaagaagatcgggtgcagcgaatgctggaagtggctgaaaagctgaaatgtttggatttatcagaaacttgttttcaattaaagaaacagatgttagagtcagtacttttggagttgcaaaatttctcagagtctcaggaggtggaggtgagcagtggctcccaagttagtgctgctcctgcccccagggcaagtgtggccaccgatggccctcaccccagtggtctcacggattccttggactacccaggagagagagccagcaatggcatgtcttcagatttgccaccgaagaagtccaaggacaaactagacaagaagaaagaggtagttaaacctccctaccctaaaatcaggagagctagtggaaggctggctgggaggaaggtctttgtggagatccctaaaaagaaatatacgagaagactccgagagcagcagaaaactgctgagggtgatgtgggggactacaggtgtccccaggaccaaagcccggacagggtgggcacggagatggagcaggtttccaaaaatgagggttgccaggcaggtgctgagttggaggaattgtcaaagaaagcagggccggaggaggaagaggaggaggaggaggaggacgaagaaggggagaagaagaagagcaactttaagtgcagcatttgcgagaaggcgtttctgtatgagaagagcttcctgaagcacagcaagcaccgccacggcgtggccaccgaggtggtgtaccgctgcgacacctgcggccagaccttcgccaaccgctgcaacctgaagagccaccagcgccacgtgcacagcagcgagcgccatttcccatgcgagctgtgcgggaagaagttcaagcgcaagaaggacgtgaagcggcacgtgctgcaggtgcatgagggcggcggcgagcggcaccgctgcggccagtgcggcaagggcctgagttccaagacagcgctgcggctgcacgagcgcacacacacgggagaccggccctacggctgcaccgagtgcggcgccaggttctcgcagccgtccgcgctcaagacgcacatgaggtacgcggggagccgtccggaggggtccctgcgcactggaagggtgtgtcaagcactgaggtcgtcctgggatttgatgtctcactgcttaatttctccgctccaaacctgggggcttatttcgagacagcgtttagttctctgtcaaggtacaggggctgcgagtgatggctctgctcccttgttctgagacccctggggcgcccctgctggccgggacgtccctctggtgggaccgcgacagcggccgcgggctcgccccaccgtgctggaggaagagttgggcctcgttacctttatttctcctttcctgactcttcgtttagatcttggggttctgtgaccatccgggtcccacagtctcagtagagacctcagtgagatgccatttcaggctttaggactcgtctctggtcttttggttctcaggcttggaaggagtgccatctaggcagtctgcactccagaatcaggacagacagtgctttctgtttcttaatatgtttctgagctgcaggtgtgtggtgatgtttttaaataagttttcttatagttcttagtatatttattcttgaaatcccaacaagcagttgttttctcttctcttctagatctgccctcaaacctaggtcagtcttgggttagcagcatggtgttcattttttactctatataataagttaaaaatacttggtttaggaagtgctcagtaaattatgtttgattgctacttcatactagttgtgacattaaaatgcttatgcattttaaaaatgccaccttcggcaatttgagaacagttctcctttctctactggtgatgtcatattaggaaatgagagtaacatttttgatcatgtgacacttaatcagcagtagttcctaaggtgtttgtggctgattattctgtatgagacagctttacaaatatcagattgtggtctttagtgtttaaaaaaatctgcaaaggcctggtctctacctgcacatgccttatagcatcagcagtagggcttgtgatcaggtgtagatgaacattccagtcagtgatttatggaaaatgtgtggatccattgaccttgtgcagaaactcagtttattttgggatggagattatgggctcttgacctgtcactacagtcattctcattaggtctcttggagtaaacgatttttgcaggatagagtggaaattgtattgcaaagtgagctttgaaatacatcctaagttatcatctgaatgttgtactttcagaattcatacaggggaaaaaccttttgtctgtgatgaatgtggtgcaagattcactcagaaccacatgctgatttatcataaaaggtgtcacacaggtaaatactcatgctgttgtgattgaatgtctttcctagatctagaaggaaatgcaattgattaattttgaagttggcatctaccaaggtggtgcaggttaaagccatgatatagcttttccatctagtaagtgagcaaaatgaataaacatacacccattgccttgttgctagtgtgcacatggctgtggcttttataccaccaggccataggatctggcatgcaggtcttaggtatcaagagatataaaatagttcttttgtaaccgaaatttttttttctaagactctgtcctaaagaaattgtccaacatatgggaagagctgtatgctattatcccccttcttgctatttttaactaagaatgggaaacagcctgattgtccaactacaaggaagtgctctagtcaactctggtaaatctataccctggcttatgacccggctattcagagtaagggctctgaatgacatgaaaaagtctgtgcttggatgttcaactttaaaatgcacaattaagcatacagttaacctcaattgtattgaaaacctgcacataaaagaccagaagaaaataagttgttatatgatacattaaggtagtaggattatctcatttctgttttccaaagtctttatgatttattaattatgtgacagataaaacttaagttggctttattctgcttcagcacagtaaccctgaggtttagaatcttgtggaagatacagaagcatacagcactgaagtgttccaattcttctcagtttcttctttgcttgcattttttattcttacctgtaaacactggcttacaagcctcaagttcaaatgcatgtgagacagagatgacatgtctctgactcattagacaccacatctgtgtgattagacaccagttctgctcattctgaagtcataattcatgtcattgaatgaaaatctcatttaatgtcatgaaattagcatttaatgacatgcattatgactacagaatgagtagaattgtttaaagaaagcttgggattggggacaaggtcaggttataatgaaggattaagttagaattggtcctttgataatattaacatggtaagattttattaaagtcactatttttattttgatgtctgtgaaatcgggcacagctaataatttggtaagtctgatttgtgggattaaactacaaaaagtgagatatttaaaactcttgtcctacaattcaatcaagttgattggagttgctactctagaatagtgatatatatccattgtcaacttcccctttattctgataaagatccatagaagtgttcctttgaaaataatccagcagttcctccaaacagaagttgtgaaattattttcttgtttggaatgagtaaatttctaaaatgtgagccagctgaacaaacaatacctctttgattctagtcaaatggaatttttcttgcaatttccaaggatattttacaccaactttcagtaagtagcaagcatcttacatgaatatatattttatgatagtttttactggaaaatgtaacatgctgcctaccaaggcacttttgagttcacgtgggttttaacagtggagacctactgttccatgtgtttttaatgcctgtattgtttatgactttatttcattttctcatgtaggtgaaagaccttttatgtgtgaaacatgtggcaagagttttgcttctaaggagtacttaaaacaccacaatagaatccatactggatccaaaccctttaaatgtgaagtatgtttcaggacttttgcccagcggaattcactgtaccagcatattaaagtccacacaggtatggttggaatgtcccagggaagggagtttagtttggccaaaaaaaaaattctaaagcttgtagatttaccagtaaattacttggaactaagcttttgaagaaaactggccaaactttgtatgtcataatagcatttctttagagattgtttctaactctgagaaactgaaaagtgggagcacttatgtgtgtaaacgggagaagactaagtccctttgctacatggagtttttactgaaaaggacagacagcttagtcatggtgtgaatgtaggaagtggatgtggatgtgtggacatagggataatgatctgtacatgttagtaaatgcacatgcacacatgcatattcagttgttaggggtcttgtaattttatactccattaccatggaaaacaggtgtcattcctatagttataatacctgctgcaggcacatgtcctggcccctttttggtgtaggccataaattcttggtattatagagatagtggatttgtagcccttaagttgttcccaacataaccttccttatgttggatgctgaggcttcccagtggtttgcaacagcatcattcactcaagtgtgtattcagaattaagcacagtaggccaaagggacccaccagcagtctcctctctccctgcctcaggggagcgtccctactgctgtgaccagtgcggcaagcagttcacccagctcaacgccctccagcgccaccgccgcatccacacaggggagaggccattcatgtgcaatgcgtgcggacggacattcaccgacaagtccactcttcggcggcacacctcagtaagcagtgggttggcttatttgagaaacaagctgctgcccttagatgcacggaaagagaaatacctaccaccattctccaaggtggttagaggtcgagacaacaggtactttctccttgggttgtctctgcagtggaacgctcacggaatgaatgaagtggaacaccaagccccaaggcccagggaaagcaccatccacgatgactactctgtaacagtgagggtggtggcaggcgggtacttattagtgaaagttgaaaattgaagttgtagagggactattgttttaaaagatgcacttgtccagagacacattcagtgacctttgttttgtgtttaacttatagatacacgataagaatactccatggaagtctttccttgtcattgtagatggctcgcccaagaacgatgacggacacaagactgaacagcctgacgaagagtatgtgtcatccaagctttcggataaattgctgtcttttgcagaaaatggccatttccacaacctggctgcagtccaagacactgtacctaccatgcaggagaacagttctgctgacacagcctgcaaggcagatgactccgtggtgtcccaggacaccctcctggccaccaccatcagtgagcttagcgagctgaccccacagacagactcgatgcccacacagcttcactctttgagcaacatggaataagagcttcaagcagttcccatcctgttagtctgcgtgtgtggtagctgaactcaagatgatgtggggctaagaaaaataattgtccatgtgcaaagatgtgggcaagaatggcctctgcagattttcctgaacttctgctaacttgcacggctttatcacagcatttttaaagctttccctcaaaaatcctgatctgcatgatctcagctactttattgacaaaaaggcagtgaacataacctcacttaattctggtgtagggtgtatgtgctaatcgttctaattcttgattacctagtttatagataactgctggtcttaattgcagagtacagagaactgaaccagctcctgatattgtagttagcagtcttcctggcttctcactctgccttatatttccatgtgggtttacttctctcataactactttcaaggtatttttcttccaagctgaaataaaactggggccacatattttcagtcatttcttccctgttgaattgaagcaaatcagattttctgtggggaccctcaaatgcaactgaagaaatagattgttgcattcattcctccccaccccccatttgtaggcagtaaacaaagtatgactgacagattgaacacctgcaaaactgctagcgtaatctcagcacatacgcagctaggaagtttgtcataaaatcaacttagaaatgagatgaggctgttcagtttgtcttaaaaaaatcagattaggtaaaagctgtcctaccaaagagtctagcaaaacaatatagtatttttttgcagaggcatgaaaaattaagacgctttagagtacttgaaagttgtgtagtcattttatttgcaaaatgaggtgactgtggcaaattatagaacacagagtattattacttttgccaggtttttctgacttgatttctgtaatttccagaaacccagacttctcatttccacacctagagatggaaacaggcaagtaactgacatgtctatttccttgggagcatgtgagaacatagcagtagggaccaaaagtctcagcacacttacctccgattatgccttaaagagttgattgtgaagaaccagtaactttgtcccaaatgcttctttggctgtttcatgcaggacttaattattgcttttaaaaattcacaatgaaaagacgattctgctgtatttgttaaacgttgacatttggttctagggccttgagtatgtgccacgtgcttgtgaaatgctatgattcacatgtaacatttaaacattaatttaaaaagggaaccttggagaattcttttgttcactagttccttttttctctacatttttaatttattaaacttgctgtgaaaacactttgattttctaagaggaaggtactttaagttccagaatgaacatgtagctgcactatgccagaaattaatgagggaagactttcttcctaagtgcttatgttttaacttatgttagtgaaaccactacaaggtgtttcaggcgctgataacatgcttcacacctgcccttggaggtcacagtactaatttacttcaaatttagttatgacagtgtcactgtatcctagttatgtttacagcacaaataaataatgactgtcatacatccagaggagaccgaacctgcccagctgatgtactgttttatggaataaagtcacttgatcagaaggaattgaaacaatagatcattttgttacctactggagggatttttgtcttgaatttgtttccttagaaattctacaaaaaaatgttgttaataaatgtctgctttgtaaaagcagttttgcaattttttaaagatctatttctgttataatttaggttctgcagaaatatgattcttaattgaaacatataatttgcttaattacgtgaataatgaaatgtaaaatccgggtccataagcctttatttcatacagtcctaggattaagctgtttaactgcttggatcccagttggtctctggcagtgggatcctggagaggagaaatcctggcctctgctcatgcgcaggccacaaccgggctggaagtgcggttgagctctctgccactttcttcaatgtaaaaagtaggcatcaaagatacgacttctactatatacatttctctgtccctgagaacagagaaacgtaaccctgtaggggactggttacagaggacctcctggagcatctgccccattcctccaagtccaagcacagccatgctgagtggaagcgaggccaccatctgagtggattggtcccaagtgtgtaatgaggaaagtggccaggtgccggcacagtgcctctcccagagcctcaagaagggccatttaggagcttgcttcaaccattttccaaccattttctgtgaaatgctgtcagcccaaactccaaagggatgtgcagcctttcgttttaccaaattctttgctgtcgtttggaaaaaatgggccatgtggtggagacctttatttaaggtgatttttacagaaatgtgattttgctgtaggtgattatccaaacaagtaaatttgagtgtataatttaatttttaacctgttaaataaaccttgtccctccaaggagttcatttttgggaaacaagatgggtacttgtcaatttaaccaaatgtcatgatattcatgtactcaggagtaacaatatttcatttgatgtgactgagaaaggcacacaggtcagaggatcatctagcacagcagtccccaacctttttggcaccagggaccacttttgtggaagacaattttcccacaggtggggggacagaatggtttcaggatgattcaagcgcattgcatttattgtgcactttctattattattgcattgtaatatacaatgaagtaattatacaatgcaccataatgtatagtgggagccctgagcttgttttcctgcaacttgacagtcccatctgggggtgatggaagacagcaacagatcattaggcattagattctcataaaaagcgtacaacctagatcccgtgcacgcgcagttcaatagggtttgcactcctatgagactctaatgacactgctgatctgacagggtgcacagctcaggtggtaatgtgagccacggggagtgactgcaaatacagatgaagcttcactgcctgcagctcacctcctgccgtaaggcccagtttctaacgggttggggacccctgatctatcacatcatgctaaatgagactcagaaaatcatctgcatacctttggcaatccgtacgtggactcttaactaaggctgacaaaactaagcttttaaactaccatggtggcatcttcattaggaaattgattctgagaagagccacttgatttaggctttgaatgatcaacaactcagaatgcctagatgaggacagcttgttctaccatttaaaacattttgctttgacttacctgaagtgttgtgaatatactttaggacctgaaatcaaggctctatgataggatggtaggatgagccggtctgcactacccgccatgggtcctcttcctcatcagaacttcaggccccagtggtcagtgggactgacccttccccaggggcatctcctctccctgtgcagatattttgcaaaattaaaataaatgcccacactgaccagatagttgagtggtactttcttggggtaggagagtgtcaggcttaggggtgcctcacctccccaccagtcttccagcaaccatgccttcctcaactttgcaagtaactgtagaccctaaaggattcaaggaagggatgagaatgtggggtctgcagggttatcatgtactttagtggactgcatcaacagaagttaccagggtttccttctaaaccctcagtctgcaaaaccattacggtgccctggaattcccaacaaatgaccggagcctagagagtattaacgtctgttgccttaatcttaacgggaacaacttgaaacaatggaagctacttttgacctatgccaatttagcaacaagactcatcaaaatattactgataatttccactttataggttaaaataaaacaagcatactttttctgctaaggtagatttattgttacacatggttagttttcataacgtaatcccctgccccagagcaactcaggactccatggagcaggaagcctgctcttggtcatagctcataccacagcaggcaggtcacgggggcatgctgtgctgccaagtcctccaaaggaagtcacaaaggtttgcatttggacatttaaatccacaaaatcaggagaaacaataaatgcacaagggctggtgcatatactttggttacagtgacgccaccacacacggtcacgactgtgcaaaaatactgctttcaaatcattaaataaaaaagaactcacacaagctataaaaatgttgccacaaaaagcaaaactttcctctaagaaatattaactgactttgactatgaactaactccagatttgctaaagtacaagaattgtaccataaataattatattttgttcataagtaacattctataaatcttgaagacctagctcacaggcatcttgaaacatggcactgtcctacatccatgggacatttaaaggaagtaagtttgcacaccactaactgggcttttctctcattcttttttttaatcttctggcaggtctcttctagccattacaattactttgattcttttcatgtgaaatattaaaaacaaaaattaattcttaaccccggaactggtcccagtgtttattgcaatacaaacaagtgaccctctaattgacacaacaaaatgttacaaacattattgttaaaaaaaaataccccttcagacgggtctgttggagtataatgatgaaagctaaacataattgcccgaaaataaatcatgtagtttttactttaagtggtcagaccagaagattctttaaacaagtagaaacaaactacttaaaaccagaggactcaagctgcagaaccactcctcacaccccattttcacaaaagtgcatttggctggttgtaggatatattattaggtggggaaacaaaaccccacttttctctctgatcattttttcataagagattctaagagggagtgaaaaagtaccaactggactccattccaggtcttacctctagaagacagccagctctcatttaagaatctcagaacttggaaggaaggaggaaatccacattaaattctagggcccaacagacagagtgtcttcattgccacccccagtagtggggactacagtgcacctgtagtcccagtagatgctctgacatcacagagcttcctgctctaccagcccacctcatgcatgtcaccaccataactatagcctgcaagtcctcgtggccacctgatgtggatcctctacagtctgtccttggctggcccttcccacttcctttcctgctactttctctttcttcctagactgacctactcatcatttctcaaacaacctgcagtcgacccttggcctggaaacactaccaattccagttgagagccaccaaaaatgaaaacatcattccaatactacttactactacctgacataacataggaagtttcgttacctgtcatcagtgaagctccgtgatgtcagagtgtctgctgggttaagtctggcaacacatttcaaatataaatcatttaactataaatattcagaggacattcaggagacaagcgtatgtctaaagtacaatatcagcatataaattaataggatcaagttcatgaatcaagatagcatacatatattatataaaccaattaaacacgacagagttcaaacacataagccaacatattccaccagctaagagaacaatcaagtcccctgagaaacaagttggggttcttgcccacttgggcatacaggacattcctgtaccacattcaccccacctaacccatcatgtacaataaacaggaaaattacatacattcattctcaagcttgacttagataatctatccagccctgaccaagatttctatagtcacagcacagaacacaccacctcaacgtgggaaagtgtataaacatgaaaataatgagcaggctatgccaattaaaatacttcaatgtaaatataaagggatttccactccaactaaaagtgaaaactatctccagaaaaagagaaaaattccatttctaacagatcttgtgatatgtgtgtgtgtgtaaacgcgtgtgtctaagtacaaatcaaattcactttgacactcatccatacatgaagcaagtacttccagaaagctcccttcctcacaatgtgatgcctacagaccctggctattctaaatttttgccatgcacatgttagcatacggaacaacacaaaaagcaaagaaactagtcactagcaccatcaaaataatcacaggataacaaaaatagaaatgatttctaatgaagttataaactcattcctagtaactgtcctaaactaaacacacatttaaagaacatattcagatgccaaagcacagagaaaatgcaaagcatctatgagaacaactgggctgagtactcaagtccaacaaaaaggacataaaaacacgtggcaacattaaacataggctccacaaataccaatgaaatatgaggaatgagattctgaagtacttctcagaaaacgctgggggttctgataagcatgaaacaacccatcattaccacaagatgaacaggagcctctccttcattcatttcacagcaacacagacttggcgagcttaaacaatacacaggccgtctggctcatatgcaacaaaattaagccattaaataggcatcccataaagatcacttgaccctaagacaaaactaaagaggagttagctgcatgccacaaagacaaaaacatttcattttaggtctccatctccttctccatccccttggatggactttttgatgcgaagcaacatggtggtcagccactgatccaagcgagatattgagtcaaattccttcacctagtataaggaaagaggaacaggaattaccccatgtaaatacattaaaaacacaaaataatagtaccccaagctgtttatacctttacagccataatctactaactttcttcatcatttgaaattaatcattccagtttataactttcttcattaaaaaattgtttattttttcattatcctgttactattttgatactagtgacaagttcctgggcttgacatttctctgttttcaaacgtgtaagaaaaaaattcattaacagtcataattattgtggcaaaagtaactggatattgtataaaaatttgaaaggaatatggaaaattaatactcactgaacatgggaaaacattaattacagagttagaatatgtatggaagcggaattaacacatttcaatgcattacccaaaaataaaattacaataggatgaaaatgatgtggtaggcaaaagtcagacaggaaaacattcctttcctctatcactcctgagctgtgatgaacatgttacaggaggctactgagaaatttgcttgaggctggatgtagtggctcatgcctgtaatccttgaagtctgggaggccaaggcaggtggatagcttaagcccaggagttaagagaccagcctgggcaacatggtgaaaccttgtctcaacaaaaaatgcaaaaaaaaaaaaaaaaattagctgggggtggtggtgtgcacctgtagtcccaggtacttaggagtctcaggtgggaggatcacctgaacccaggaggttgagggtgcagtgagccgtgatcacaccacagcactccagcctgagtgacagagtgaggatctgtttcaaaatatataaaaacatttttttttgcttgattctaaacatgagatggcaaaagatggaaaaacaaaaagtataaagaaaaaaaccctcatatttttaatatatatatatatttattatttatttatttatttttgagatggagtttcactcttgttgcccaggctggaatgcaatggcgtgatcttggctcactgcaacctccacctcctgggttcaagagattctcctgcctcagcctcccgagtagctggtattacaggcacactccaccatgcctggctaatttttgtatttttagtaaagatggtgttttgccatgttggccaagctggtctcaaactcctgatctcaggtgatccacccgccttggcctcccaaagtgctaggattataggtgtgagccaccgtgcctggccaccttccatttatttcatgccacaaatacagcaaattctcactacttagtttttatattttaaattatatttaattttttttttctttttttttttgagacagagtctcgctctgtcaccaggctggagtgcagtggtgcaatctcagctcactgcaacctctgcctcccgggttcaagcgattctcctgcctcagcctcccgagtagctgggactacaggcgtgtgccagcatgcctggctaatttttatatttttagtagagacggggtttcaccatgttggcgaggatggtctcaatttcctgactcatgatctgcctgcctcggcctccgaaagtgccaggattacaggtgtgagacgccgtgcctggccttaactaattttactttatacttatttatgggtcagattattttcaaaagaaaaaattaaaacagcaaattataagaatataaatggaatatttgctcctgaactagtctcacagctaaattagttttgagtgtaagtcgaatctcagcatggctaatggaactgtttaatttgtgtgatatataaaaggtgacgtttggaaaatacaacttaaggtatgctggagtcatgttcaaataaatgtttagaattcacataatgaaaaggaaaagaagtttctttaacttaaatcttcaaataatgtaccatgtcccaaaagcataacttactgcttcagtgtaagcttcactgttctgttcttcatgagcttctaggagtttctggtagcataaaaatattttaaaaaacagttctgtaagatgaagtcccatttctaaatatatactttaagtataataccaatgttgccaaatattgcacaaaactgaggaaatactcatatacaagtcaagagccaagttagggatctagcttctgtagtaacatttctcaggtgcctatttcagaacacaactacatgtttctgaccttaattgcatttgaacacctataatacgaaagcaggaaagtaccagggcccctcagttagcagactttatagattaaaacttcacttcatacccaatcccacttaggtgttgtcacctaacagaacaaaagcatttttcttcaaagttctaatattacttactttcaataatttacattctcttgaatcagtaaatgctggaaacatttcctcatatttctcaagagcaagctgagagagaaaaaccactcatcaatttcagacttactaaacaaacaaagctttcaacattctatcagcttcaaataagatctacctatatcctattaagtgttgaaaaagtatgtagttaaactcaaaagcagaatcaacatagaaaatctttctattctgaattttccatttcaataaagaataatttctaaactacttttttctgagttaggctgctgctgagaagacattgtaaatgaaaatgaattcttaaacactcacagaccaggtatctgtatccatccattaaatggagacgttcttaatacagtccagattccaaataaattacatttagcttcctgctcgaagctgacagaaagaacagtttctcttactggctttagttctgctcttccaactccagacactggccatgccaaggctgcctgtctttttgcctcttggctcccagtgctcactgtgcttttcaacttcttcccagtcctcactccaacaccatttctgagcttgcctgttgttttggttgttttttaaatggatattatcctactcttattgtctcctcccttagttccttaatttctttcttttttttttttgagacggactcttactctgtcacccaggctggagtgcagtggtgcgatctcagctcactgcaacctctgcctcacaggttcaagtgattctcctgcctcagcctctcaagtagctggacttacaggcacccgccaccacacccagctaatttttttatatttttagtagaaacggggtttcaccattttgaccaggctggtctcaaactcctgacctcaggtgctccaccccacttggcctcccaaaatgctgggtttacagatgtgagccaccacgcctggcccccttaatttctttaaagcaaaactactgaaaaaaaaatggtggctaccagtgaacatatacatatatttaagcctatagcactaaatattcccaggcagtgccccccattcaagtaccaggctctacactgcttagcttctgagatcagacgagattgggtgtgttcagggtggtatggctataaactatcaggtaacttttgagaacagctttgacagctgttaaaagattacaactgggacacataccacagaataatacttatttttaatgtacccgtttattcttggtactaacatcaaaatgaaatgataccaagaacaagagagaatgtgtacgtattcttatgggtgaaatcagtcaatcaatgctgaagaactccttaccttggcattcaactcgtctactatgaagtggcagagggcagctttgaagaagtaatcctttgcactgtatttcaacaaaggattatccattgtgtttgccccaacctaggcacagaacgcagagttaaatttaaaagatttaccctcttatatcaggcaaagtcattctcatctgttgtcctttagaaaataattatgtatcttatgtttgtttagctatgaaatatattattttatccgaataccatatagtagaaattttactagacaagaccattaaatacatgaagtcttaaccagttaaaaatagctcagaagaattctgcttccaataagatggagtaaacatcctttcccctaatcctcccactaagcactactaaaagcccaggtcattttctaaaaaacaaacgtttcccaagggaaaacgtggtagtgggttccctcagttttcttttcccttcctatatccatggcatgaaactgaagaaccagcaacccagaaatgccagtatgcacagataaaaagagaagagacaaaagcctgctctctctggccaaaggactagaaaaggggcagcccagcaagagagaaaacacttagacaataactgctctactccagccaaatatcacagaaaaactgaggccctaactccatttacatcatcaaaggctgaagaaggagtcctaaagtccattcttgaaagactgtaagaagcaccccaatacctctgcttaggagcttcagagaaggccaaatagggagctgaggcttgatccccacccaaccccctgacactaaggcagtgcagaccacactgggagcctgcatcctgtctctgtcaagcaggaaagaggttccccttctttctccagctggtgtgctgtcagaagaggtctagtggagggtgaagactctcaccataccaagaacaaaccagcactgtgctggcagaaacagataaggagaggggatgccacttctgcccagggctgactaggcccctcaggtgtcaacagagacctggtggaaagctgacacttctacctccacctggcagtaatgaggtaacatccccaccttccccagccagaggaatgtcaaagaaggccaactgaaaagagaacgtttaaacaagacccagtctcataacctaatgtgcaaatgccctgttttcaatcagaaatgacttgtaataccaaaaacacaggaagatctcaagctaaatgaaaaaagaccattaacagatgatggttccagatgacggaaatgtccaaaatatcccacgaagattttaaagaagccctcataaaaatgctccaaaaagcaagtacaataacacctgaagctaatggaaaaatggaaagcatccacaaagaaaaaggaagccacaggaaaaaagatataaagtaaaaacaaataaaaatttcagaactgaaaaaaaaaaacagtaccatacataaaaagtgggtgggctcaacagcaggatgaaagggacagaggaaagaagcactaaatggaagacaacaacaggaacaacagagagaagacaaactgacaaaaaggaacagagcatcaaggacccatgggataataaaacagtctcacttttgtggcatctgtgttctagaaggggaggagaaagagaaaagggctggctgggcatggtggctcacgcctgtaatcccagcactgtgggaggccaaggcaggcgaaccacttgaggtcaagagttcaagaccagcctggtcaacatggcgaaaccttgtctgtactaaaaatacaaaaattagccaggtgtggtggcaagcacctgtagtcccagctacttgggaggctgagacaggagaattgcttgaacctgggaggcaaaggttgcagtgagacaagattgcgccattaaactggcacgcctgggcgacagagcaagactcggtctcaaaaaaaaaaaaaaaaaaaaaaaggaagctgaaaaagtacttgaagaaataactgctaaatgattctcaaatttgacaagaaacataaacctacagattctgtaagtttagggaaactcaaatagcttaaaaccaaatatatctatccaagccacattataattaaacttttgaaactaaaagaaaaaaattatgaaagtgtctagagaataacaccttttttataggggaaaacaagttgaatgacagcagacttcttatcaaaaacaatggaggccgactaggcgttgtggctcatgcctgtaatcccagcactttgggaggctgaggtgggtggatcacttgatgtcagaagtttgtaaaaccatggaagccataaagtgcacatttttgaaactaaaggaaaagaacaatcaacttagaattatactcccaggaaaactatgtttcagaaatgaaggcaaaatcaaaacgtttccagataggggaaaactaagaaaatttgttgtcagcagacctaccctaaaaaaatgacaaaaggaggttctctaaatagaaaggaaacaataatcttggaacatccagaagaaagaacatggtaagcaaaaatatgggtaaatataacaggctttctttcttgagttttctaaattatgtttgatggctgaaacaaaaattctaacattgactcatgtggttctaaatgtatgcagaggaaacattaagacaactatatattgaatagggggagtaaaagaacagaaagggaggtaagatttctatatttcaccagaacttataaaatgatgacaccaacctacagcatttaaccacaaaagctacacaaagatatataccattgattctccaacaacactggtttaaactgtgtgaatccacttatatacggatttttttcaaccaaatgtggattgaaaatacagtattcttaggaattcaacacccatataaatgaaaggcagacttttttatatgtgagttccacagggccgactgtgggacttgactatgcacagattttgatatatgagagaggtcctggaactaatcccctgtagacactgaggaataactgtacttagaaacactggaaaatcaagtaggctgggtgtggtggctcacacctataatcctggcactttgggggaccgaggtgggcagatgacttgagctcaggagctcaagaccagcctgggcaacatggcaaaaccccatcgctacaaaaagacttgagctcaggagttcaagaccagcctggacaacatggcaaaaccccatcgctacaaaaaatagccaggtgtggtggtgcatgtctgtagtctcagctattctggaggctaaggctgaggtgggaggactgcttgaggttgggaggtggaggctgcagtgagccagggtcgcaccatttccctccagcctgggtgacagagtgagacccagtctcaaaaaaaaagaaagaaagaaaaaaaagaaaagcaacccataaaaaggttggaaaaagaaaacagagaaacaaaaagcaaagaatagaaagcaaaaactaaaatggcagaaagcagaattaagccctaacatataaataactgcattaaatgtgaatgacctaaatacaccaattgaaaaacaaagattggcacagtggattaaaaaacaggatccaggctggctgtggtggatcatgcctgcaatcccagcactttgggaggccaaggcgggtgtatcaccgaggtcaggagtatgaaaccagcctggccaacatggtgaaatcctgtctctactaaaaatacaaaaattagccgggcatgctggcacgcacctgtaatctcagctactcgggaggctgaggcaggagaattacttgaatccaagaggtagaggttgcagtgagccaaaatcactccactgcgctccagtgtaggagacagagcaagactctgtctcaaaacaaacaaacaaaaaaaaacaagatccaactacaagaaactcacttcagttataatgatatagacaggctgaaagaaaaagaatggacaaacatatcatataaacattaatcaaaagaaaccaggcagggctataaagtggataaagtagacttgagccaagaaaattaccagagacagagaaggacattatgtaatgataaaagggtctctccagcaagaatagcaatccagagctgcaaagtatgtgacgcaaagactgacacaatgaaagaagagtcagacaaatccacaactaaagttggagattttaacacccaactctcaacaatggatagaattagaaagaaaatcaaaggccaatcgcagtggctcacacctgtaatcctggcactttgggaggacaaggcaggcagatcatttgaggccaggaattcgagaccagcctagccaacatggcacacacctgtaatcccagctactcgggaggctgaggcacgaaaatagtttgaacctgggaggtggagggttgcagtgagctgagatcaagtcactgcactccagcctgggtgacagagcaagactctgtctgaaagaagagaaagaagagaaagaagagaaagagagagagagaaagagagaaagagagagagagagagagagaaagagaaagaaagaaagatcagcaagtatattaaagaactcgacaatgccatcatccaacaggagctaatcaacatttataaacatcacccaataacagcataatcataaaacatatgccaagatagaccatatctaggccataaaacaaaacaaatttataagaattgaaatcacgcaaaaatatgttatctaaccacaaaggaattaaaaataagtcaacaatagaaagattacagaaaaatctctgctagacacttggaaattaaataaaacactactaaataatccatgggtcactgaagtctcaagggaaatcaataaatccaactaactgaataaaaataaaagtataatgatataataaaattgggaagtagccaaatgtatgaaagggtaactgataacactaaaaatgcatacacaacaaagatgaaaatcagcaagctaaacttccatgtcaagcacccagaaaaagagcaaaacaaatccaaagaaaacaaaatggaggaaataacaataaaaacagaaatcagtgaaaataaaaacaaaaaaagagaaataattgaattctaccaaacatttaaagaggaattcacaccaatcctttacaaactcttccaaaacacagaagaggaagaagacatcctaatgcattctgagaccagaattaccttgattccaaaaccagacaaagacaccacaagaaaactaacgatcaatatcctttatgaacatagacataaaatcctcaacaaaatgttagcaaaccaattctggcacttacaaaaagtaaagtcagccacaagggtggtcaacatctatgtcactggaccccaataaaaactcagaacaccacgttcaggggagcttccttggttggcagcagtctacgcttattttcacttattactgtggggggaagtaagtgctgtttacataactccactgagagccgacaactgaaagctcttcctggaagtctcctagaccttgacctatgagtctctcctttgagtttaatctgtacccgtttgctgtaataaaccataattgtgagtataacagctttcagtgggttctgtaagtttgtctaacaaattattaataaacttgagggtgttcttgggaaacccctcaaagtttgcaatgaccaagtagaatttattccaggaatgtaaggttggttcaacatatgaaaatcaatcaatgtaatctacaatattaagctgattaggacaaaaaccatacgcttatctcaatagatgcagaaaaaagtttgacaaaggacaaaaaccatgtttatctcaatagatgcagaaaaaagtctgacaaataaaggacaaaaatcatatgtttatctcaatagacacaggaaaatgcctgacaaaatccaataccctttgatgataaaaacactcaacaaactaggaagagaggggaactgcctcaaactgataaaagcatttaccaaaaccccactactgatatctaccgctatcacacttaatatgaaagaccgaaagttttccttacaagatcaggaacaagacaaggatgtctgctcttgtcacttctattcaacactgcactggagattctagccagggcaaccgagaaaatgaagtaaaacacattcatattgcagaggaagaagtaaaactattgttatttgcagataacatgattttggatatagaaaacctaagaaatccacacaaaaaaacctattagagctaataagtttggcatggttgcaggacaaaaaattgatatgcaaaattcaactgtatttctatacactagcagttaacaatcttaaaaggaaattaagaaaataattcaatttgtagtagcgtcaaaaaaaaaataaaatactttggagtatatttcacccaagaaatacaaaacttacacaccaaaaactacaaaacattgttgagcaaaatgaaagaagatccaaataaatataaaaggaacctgtattcatcgactgtcagacttagtattgttaagatggcaatactctctgtgatgactgattttatgtgtcaccttgagtgggctacagggtgcccagatatttggtgttattctgagtgtgtctgtggggtgtttctgaatgagattaacgtttgcatcagtaggatgaataagcagattgccctccccaatgtgggtgggcctcatccaatctactgaaaacctgaataaaataaaaggttaaaaggaagaattcattctcaatgcctgtcttagagccaggacactggtattctcctgattcagacttggactcagattagaaattacatcatcaactctcctggttctgaggcctttggatttggactggagctataccattggctctcctgggtcttcagaatgcagatcttaggccttctcagcctatataatcaagcgaatcaattccctccagtaatttctctctctaaacacacatacacactcacacacacacaaacacacacacatacacccctacacctcttattggttctgtttctctagaaaaccctaaaaccactccaaattggtatgcacattccatacaatccctatcaaaatccaagctggctactttgcagagattgacaagctgatcctaatattcggatgaaaatgcaagggatctggaatagccaaaacaattctgaaaaagaacaaaaagctggaggactcacacttactgacttcaaaacttactgcaaagttacagatataaacagtgtaatactggcacaaagatggataaatagatcaatggaatagagagcccagaagtaagccctcatatttcatatggtgaaataattttcaataagggtcttaataccattcaatagttaaaatatagttctattcaacaattagtgctagaaaaactggatatccacatataaaagaataaagttggacccttacctcatactatatacaaaaattaactcaaaatggataaaagacctaaacctaacagccaaaactatacaattcctataacaaaacagaaaggaaaagcctcatatcagatttagcgatgatttcttctatataacaacaaaagccagacaaagaaaaaatagacaaactggacttcaaaaatatgaaagacttcagtgaatcaaaggacattaataacagagtccagagacaacccacagaatgagagtaaatacttgcaaatcacatatctaataggggattaatatccagaatatataaagaacacctaaaactcaccaccaaaaaacaaacagccaaattaaaatccggagaaagtactggaatagacatttctccaaagatatacaaatagccaataagcaaataaaaagatgctcaacatcactagtcattagggaaataacaatcaaaaacagaatgagacaacatttcacactcattagggtgactattatttaaaaaaaaaaaaaaaaaaaaaccaaaacaagtattggtgaggatgtggagaaactggaacactgtgcattgctagtgggaaggtataatggtgtagccactgtgaaaatgtctggcagttcctcaaaaagttaaacatggacttaccacatggtccagcaactgcaattctattcccaggtatgtaactaagagaactaaaaacaccaccacaaaaactttaacacaaatgttcacagcagcattattgataatagccccaaagtggaaaaaccccaaacatccataaattgataaataaaccatgaggtattagccacgaaaaacaatgacatactgacatttgctatgacatggatgaaccctgaaaacaatacactaagtgaaagatggcagtcacaaaaggccacatggtatgtgatttcatatatattcaaggttcagaatagaaaaatccatatagacagagagtagattgtgtcttccagggactaggaggaaagaatagactgctgggcttcttttggggatgattaaaatgttctggaattaagtagtggtgatagttatacaactttgtgaacagactaaaaaccgctgaactgtactcattacgtgatgtgtggattatatctcaataaacagaaaaataaaaagtttaattttgaaaaattattcagacaacttctctccaaggaaacaacagtatcctcacctgctcatagatctcaatggctttctggtactgctcaagctgggcagcatatgctgccaccttcagcagacacttgtttgctgagctgaaatcaagaaccaaagcagagtgagtaacaagtcaatggaaaaataaaagatgtgcactgggcctcagtacatcttcatttggtatagtcaaatacactcacaaagtataaagaagtatttttttatcacacataataaaacccattaaatcatattaagaaaagtaatacttgcctgttggattcttctcctttgtaataatcagcagattgttcataatgtgcaatagcctgaaaacatacatattttattcacacacaatttatttggagagctgcattttaaaactacatttgcataggtatttttccataaataaacctactctaccagcaaacttttcacaactcggcctactttctttaggaaatacaagaaagcatgcacctctggaagcagaatgcttgctgaccatcaaaatctgtttccccctccccacatggcatatgcccagctacaccacttcctcagcttcctccatagtgaggggcagcctatgactagttctctccagtggaatgtaaacagacatgttgggggccactcccaggcttgggccatatatctcactttgcatcctcctccaggccttccacttcccatgagctaggagggctatgaccaagtccagagtgacactgtaagctagacaccaaaatggcagaactgtcaggcaggttcctaagtaattacaaaggacacaaggtacctccaaccccagtgtctctaccactgtcaaacccttagcagccacactggattgttagagagctatgaagccctaattacaccttacgtctatgacttgcagcacagactacacacactaataccttaagtgtcacctagaataagggtgttgccgtcaatctaaaatatatggcatcaagtggagaagaaacagagatcacaggccagaaagctagaagtccttgtcatgctgtggtagaagttagtgaaatcaagcacgtgacaactcagaaaaaagaactggtgtcggccaggtgcggtggctcatgcctgtaatcccagcacttttggaggccgaggagggtggaatacctgaggagttcaggactagcctggccaacatggtgaaaccctgtctctactaaaaagatacaaaaattagccgggcgtggtgtgggcacccgtaatcccagctacttgggaggctgagacaggagaactgcttgaaccggggaggcagaggttgcagtgagctgagatcgcgccattgcactccagcctgggtgacaagagtgaaactctgtctcaaacaaacaaacaaacaaaaaaataagtgtctaccggagtccaaaactaagcaaaatggctgagaagagtcagatgatagtgtgtgctgctgtttttagcacagttttgtaagagctgaactctgcaaagaatcagctggtttgtagacggtggtagacagccttagaaataaagctctcataagattgaaaaaaccttctataccccaaataacaagagataagtatgagcagctctttaaaccagggctctagccaaagtttttctctaacaggtcagacaagaaatattttaggttttgtgcatctttgttgcaactactcagctctcttgtggtagcataaaagcagccatacacaagatataaatgaataagtgtggttgtgttccaataaaactatatttatgaacaatgaaatttctaatttcatataatttttacacgtcgcaaaatgcttttttctctcaaggattaaaaaccgtaaaaaccatttttagcatgcaaacatacagaagcaggtggtgggtttgcaggatgcttgaatgacaaaggtttcacagcaaatgcaaatgagggagctagcagtctctgaaaatcagattaaaggtgctgcctttctgcccaagcccattagttaagtggcttcaaggcagctcctagtgagttagaagagatttgcagggacaagaaaacaaataaaacaaaacaggccatggaactataggcagctttcatttgtgatgcactttgtcttcattcacttagcatctgttactgagcacccactttgtaaataggcatcatgctaggctcagggctgtgatggtgagcggaacagtcatgggccctgccctcacagagcccacattttagagggaggagatgtaccttcatcaggtaatctcacatgtgtgtacatgacagctctgacaggtgttccaaagaaatattttcttccagagaaatattttcttccagactatttctgtgtgtgactaagtatttgcaaaaagagaaccatagtacacctgttcttttatagctgcattttaaaattcagtattccgtgaaggtcaggcatgatggtccatgactgtaatctcagcatttgggaggccaagatgggaggactgcttgagtccaggagtttgagaccagcctgggcaacatgaaaagacctcatttgtatgaaaaattaaaaaattagccgggcatggtggcacatgcctgtagtctcagctacttggaaggctgaggtgggaggatcgcttgagcccaggaggctgaggctacagtgagctgtgttcatgccactccaacctgtccagcctgtggaacagaatgaggcacacgccaccattcctggatagtttttttttttatatttttagtagagatggggatttctcatgttgcccaggctggtcttgaactcctgggctcaagtgatcctcctgccttggcctcccaaagtggtaggattataggcatcagccactgtacctggccttttttttttcaagagaaaaaaagagtatgtcacatttcattttatctgctctcaagtttatggagacccatgtgttggagaccatgcctgggcagcagaaatgacacagcactgcaggctcctgccccagagtgcccttctgaccactgtgaaagaggaagctggaacaggagcctctgctggcaaagatgctctgcgcacagtgctcatccccgcaagactcactcaaacctaaataaagatactgtggccatcccagacaccctgaccaaataaataccccagccacaccagatccatctccctcccattccatcatcaattccacaccagggaacaaaggaggttcagatccagctccatcacctgcctccaggatccacagataaccttccaaagagaaggctcacacacacgtcaatgcacagggtggccctgacttgatcaagatcagggagtatcctcagaaaagtatggcaattataaaaaaaaaaggtcaaataataaattttatgtaacaaatatgagcaaattttgtgctgaataaccaacaggtggaggtcacacagtcaaaagagtgaacgttaacaatgccagtccaatttcagtaacgcctagcagatccttccccagaccaggaagactccatttggtatggtggaggtaggggtagcatttgtttatttagcaaatatttagaccccactaggtcccagagttctgggctcttgggacacatcagcaaagcagagacaaagctctctgctgacacgtgtgcccaatctggcggagggagagagacaaccaaaatgagaatgatgagcaagcatatgagagggcatattgtaaggagacatctgctcagcaatacaagaagttaagtgaggtgtgtggggatctactatgtcttcctggggggctaaattaactagggggtcataatagttaatcatggaaataggtaataaatgagcaaaaatggaagggcacggggaagttagccatgtggacttgaaagatgtgaggagtcagccacgtggacatctggggaagagctttgcagacagaggaaatcgtggatacaaaggtcctgaggcaggagcgctcatctggcatgtgtgcggaacagcaaggaggccaggatggccatgcagggtatgcaagaggaggagaataacagaaaagaggagaggccaggccacacagatgcatggggagtgtggggctgggaggaagcaattcagtggacccatgaaggctctgcacagctccagctgttcctcttagtgaaaggggtctaatgactgtcagcagtagagaaacagagtatgatgcaatgcttagaaggctcactctggctactctgtggcatggggatgtggggttggcaaggtagggagagcaaaagcagggagaccggtttgaaggatcctgcagcgatcaagtgtgagctgagagacaaggtagtgagttgtgccaagacttgggagcaggaaggacaccgctcacaaaaattgctcacaggttgtagagaaagagaaaaggcaaggaagcctgtagtttagcggggaacactgggttggggacatctgagaatccagtcccagacatgttgggttagagatgactgctggacaaagtggagaggtcagcaggcaggtggatacagtaatctagcatttggagagaggtctaggctgcagtcagatttctgagtcactggcacacagatacttaaagctgtgatgctgactgagtgtacagaggtgacctcttacactttcttcactgggccttagagtactaagcaatacagctgaaggttcttttggcaatgctaatgttctgacatgaatcagagagagtggaaacaacaggtgatctctgtaaatcttaatcagctctcatgtcttagatgtccactccaggaaaacagcccatctacttagccagctagtagactttgccagaaagtctccaggcaaggccatctatgaccactctacacctacgatcactctcagactgaggagaggagagttctttgagtcagcttatctgcctgcttcacatctgaggaagtgtgcccactgcttaccttctcaatgtctacaagttcagtctcatagatctctgcaatagtaatgtggtgcttggctgcaattgtaaaccttccctaggggaaaaaacaagaaacagtcacacaccgattttacctatctgaatgccagtttgggaacataaaaaagaaagatagaactctaagccatctcaagactccaccccacagccactcaagcaatgcaatgtcttaccatgtctgtgtaaatgtcgatggctgcatttaagcagttgatagcctctgaagcgtaggcatttaagaaaaacaatgaaaaatccattcagtcaaagagggttcaggtgaggctgtcttcctggctgttatcagaacgttaatgaggtataattttggagtggagggtgggcaggttaatgagaagcaaacaaaaatcatgcacaagtccagattcatcagcatggctttgttcccagcagctatagtataatttagggaactgtagctggagtaacattggcttagttactcttaaccttaaagtgaggactccatccaggcaaaagactgtattataaagaaaataaaaccatagaggttgtcaccaacactgataaattgtatctgctaaaatatgaatgcaaacatattcctcattaataccatgcatatatattaattttggaacatggcaccacatcacaagaacaatcacctcaatagattctactctccatgcagccaaaagcaaaagcactttgaaatgcctattcaaacaacccttaagcaaagtcaacattctgtataatgttcaaagatgctaaattgtagcatactaacaaaatgaagaaacaaatctaataaataataatgctaataaattttactaattttctaaacaagtgagccaaaaaattttccctatcataaaatgatggtgtttatgatgctggcatacagtgacagctccaagtttattacgtttggtttaaagaggcagcaaagtagaaaggcctgactacaaaattagaaaggtaagcagatgaacaaaaattaaaacaatttccctctaaactacataaaaaatgtggatccctgttacaccttttaaaatacagaatataaagagaaaaataatctatcaataatcccgctcaaatccgttgttagtactcagatgtactttccttttgcgtttattagacacatttctatatgcacaaacttttttctgaaaatgagattatacaacattcagtctcatgtgcttctttaattgacatgtaaacatttaccaggtcactgaagattctctgaaaccagggattttaatgcctgcaccatattctaaagtactgatgcattacaatgttaccactctaacagcttatttaacctgtgtccagtttgtcactttgggaaataaactgtgattaacccttataccaaaggtattgaagataccctatttctttatgacatatttattctcaaaatttgggatctgtgtgttaaacaaaatggactgctaaaagaaaaaggaaaaacacaaaatttccgctgtgcacgcgtgtggaaggtaagaaattaatacttttaattacactcttctaactaaaaagaaataatctttgcaaaattttaccacattaaatatccaattgcattctttcctcaaaacaaatactttgaaaaactttttaaaaaaccaaatgaatactgtatgaatcagactttttaacgattgaatattacaatctcccattaactggatctgaaaactccttaggtatttaggagtaagggaacataagagtttccttttatgaacaatatacattttcacaaaattaagatataagaagtcttagataaaattaaaggtaatttccaaaaaattctctaaaatgcaatataaataagagtttaattaaatgatgctataaagtaaacagccagtataaatttaacataatttctcctcataaaagcccccaaatgattaaaaaagaaaaatccctaaggttatcaaaattctctattattccaaaatacaaaaattcctttttaccaggacttgaaagcacaccaacactgaccttaacgttgagggaagtactgactggttagttacacacagagatagcatgctacatgcctggctgtcttaccttggggatctgcctttttgtaagcatttccagcatccacaaagctggtagcagagtcatgtttgctctgaagctgcatgtggagcttggctgcctgacaaaatgcgtttcctgcagctgaagaagacactacaattaaacacagaggaacaagtcccccccagagcagcccatgctgtaagcactggacctccctagaaaaattatattccactgaaaagaagcattctagtcagaagcaaaaatccatgtggtccagtgcacctcgggcaaatataaaaataaccagaatcaagtcaaacagcgatgaaagcttctccacctcagctccagcagactttccaagtgtccctgggcactaagccactattccctgatctgtccattcaataccagtagccaagtcttgggctactcaattcaattccactaacatataataaacatcagctaagggcttcaagccacaaatgattaaagaaaggtaaaacactgagcgcaaagatatttgctcacttttctatcttagtgtctcctacacttagctgtcggtgtggaagaaactgctaatgaaggcttcatggataaagtaagtttcctaaaaagtgaaaatcaggcccacaattttgaaatccagaaaagtctaaaaatccaaatttttttctttactttatagcaaaatctgactgaaatttatatgaggtttaatctattttaccccatttagtgtgagaatttacaaatttccctgcagaatcactgatggatctggttgtggggtaccacccaggtctccaactgggacacagtacaacatataaggtacatgaactaatctttttcagaaaaggttttggatcagggaccatggattctggagtgctggaaaagaaagagggaaggaatcgctagcagaggagtcacaggaacacagaagaaatgcttgaaggtaagaaagggctggaagtggaggccagtgacaagcctgccctgactggaggaggccagtggaaatcaaggctgaggctgcatcaggccacttcccagagggtttaaacatcaacatgcgaaacttcctgagttcagagaaagcaacacagcagagtgcctctgaaaaatgagtcacattggggaagtcagtacagcagaaatggagaggaaagaatctgatctaccaggaaaagcatggttaagaatatcacaaagcctttaggtttctaaaaaaattatcataaagcagtactcactgctgatattaaacatttgctataaattttttttgtgaggaaaaaaaatccaattcttttctttttttcaagacagggtctcaatctgtcacccaggctgcagtgcagtggcgtgatcacagctcactgcaacctccacctcccaggatcaagagatcctcctgcctcagcctcctgagtagctgcatgtgccaccacacctggctattttttatttttaattctttaaaaaatttttttggctgggtttggtggctcaagcctataatcccagcactttgggaggccaaggcaggtggattacctgaggtcaggagttcgagaccagcctggcctgaacatagcgaaaccctgtctctactaaaaatacaaaaaattagctgggcattgtggcaggtgcctataatcccagctacttgggaggctgaggtaggacaattgcttgaatccgggaggcggaggttgcagtgagccgagactgtgtcactgcactccagcctgggtgacagagcaagactcttgtctcaaaaaaaaaattttttttttttttttttttttttgtagagacaggtgctatgttgcccaggctggttttgaacttctgggctcaagcaatcctccagcctcggcctcccaaagtgctgggattacagatgattatacctggccgtaaacatccaattctgctaaagcttcagctgcatctcttgttccaactccctctccccagaggaaatgcacagttctcatgtgggtttctgaacctgagggcaaagggacagtacaaactctggagcccacctgcccaggttcaattcttgctctgtaccacagtttctgattaaaaagagtacccaggcatctttgaaaaatatgtaaccaccagcatgacatgggtagtgctatgatctgaatggcagtatccccccaaaatttgtattactggagcctgatatccaatttgacagtattaagaggtggggcctttgggggagtgataaagtcatgagagcaccaccctcataaatgggatgagtgcccttataaaagaggttgaagagaactgccttgttccttccaccacgtgaggacatagcaagaaggcgccatcgtggaaggtgagaacagtcctcaccaaatacgggatctgctggcaccttgatcttaaacgacccagcctccagaactctgaacaatacgttcattttctttataaattacactaaggtattttgttatagccgcaggaagaaaccaaggcactgaacaatcagagtacatgccagcctcagggctagagctggaactgaagaagccctgctggccccttgtgaatcatgagaggctggtgggtatccagaaggggcaaaggccactgccaggacagtggccaggcacctggggtacttggggcagcacttaaccatgaagtggcaactcaggaacatatctggctaagtgggagctttaatgggctctgcctcagaagaacgtagtaatagcttggacttcgcaagtaaagtgcttagaagggcctgactcacattacacacggtggccactttcattattacatgcaaatctagccttagatcatatctgtggtttggcatattgaaatgccatcttttttttacaatctacatccttgctctcctgctggcatttcatttttgataacttatctatgtttcctgtctcagaatcagtcatgggccatccttttcttgctcagtaataccacaacacccaggctcttctgggctacctccatttctccagacaacagtaagcgctttaattttacattttcacattcccacattccaaaacgagttgctggcttactttttcactctgactattcattccaatcactgacagcaaatgctagctcggtctatctaaacttggaagtgttgggccgggcacagtggctcatgcctgtaatcccagcacttagggtggatcaggcactcctcgtggtcaggagttcaagaccagcctggccaacatggagaaaccccatctctactaaaaatacaaaattagctgggcgtggtggcacatgcctgtaatcccagctactccggaggctgaggcaggagaatcgcttaaactcgggaggcggaggttgcagtgagctgagatcgcaccactgcattctagcctggacaacagagcaagactccattctcggaggtggagggggaacttggaactgtctttaaaggatcatatattaaattaaatggtctctgggaagccacacaacttaggctaaatttcctcacccgcaaaactggtataatacctgtgaggatgatctctcaaaagctgagtatcaaacaaattagcttagtcattatgaaagaacttttaaaactataaagagatgcaatgctgttatgatcatcaccaatgcaacatggatagaacttcaaggagtctaatattcatccactcaacaaatatactgagcacctatgactttgcaggtaataatccagggcctggagatacagcagagataaaaacacacaaacatggccttccaaggtttactttctaatgagaatcaccatataataaaaacatgtaaatataaatgaataaaacattatgtaatttatttttgctagatggtgataacagtgttggagaaagaaaaaaaaaaaagtttccaggaaggacaagattgttatttttaaaaggggtggccagagaagacctcaccaataagttgacatgtgaagagggagctgaaggaagcagggacccagcaacattctgtttggggaaagagtagggagacagagggaacagtacatgcaaaggctctgaagtgggagctgggtgcacaaggaaggggatagtctttgagggccactacagagacgtcagctcttatttggaatgatatgaccttacttaacttgtgttacgttacttcattaacacatttatgcctagtgttccttcactggaacgctaggcacgtgggagttatttatatcctatcctactgctcaaggtcatcgccaaggtctgatttccaaaattcaaaaaattgcaacctcagacataaatggaaacagactggaaaagtgcagcagtatgacaatgtcaggaggctagagcatcaccccaggcaacagatgacgcggggtgcacatacaaagcctccttagttacatacatgatcagtggcctctctgaaatggaatttccaaaggttagaatacctcatcaccagatacaataagtaataagtggtctcagccgggcacagtggttcatgcctataatcccagcactttgggaggccgaggtgggtggatcgcctgagctcaggagttccagaccaccctgggcaacatggtgaaaccccgtctctactaaaatacaaacaattagctgggcgtggtggcgcgtgcctgtagtcccagctacgagggaggctgaggcataagaatcgcttgagccccagaggcagagattgcagtcagtcaagattgtaccactgcactctagcttgggctgcagagtgagactctgtctcgaataaataaataaataaacaaattaagtaagtaaataaataagtaagtaagtgatctcttcaggtaagatcactttttacttataagacctgaacaaaataaaagagggaatgtgaaacaaactgttttctccaccattttaaaaatacaatataattcaggcgtaggtgtgttttgaaaaatagcatatctaaagccttagctaaaactaaacttcttacaaagatctttaaagccagaagagaccttttagaatcatctagctcaaaagcattttctcctttgaaatgattttaaagtgtctgccttgaaacagcttgtagagggcgagtcccacttccaatcccacagcagctgtgagccagagcacaacacccacgtcccctgctctggtcaacggtggtctccattttcactacagaaatatcccatcactaaggcatgaaagatctctttcgctgaagggagagggatgaatttctctcaaagagccatcccatctcagaccaatgaaaataataatcctgtgaattttgttatgcccggtctcactgggtagaaagcattactttaaaaaataaccaagagtctattgaggttaatgtaaatccatccccctccccccaaaccccactttcagttctcagtggaatcacaatcagttattgcgtagcagggaatggtcattctcaaccaatgttcaggtaaagaaaattctctttatcccactagttttaatgacttttattccaactttcattccttatggcactgtgtttatttgaacatattagtaagaagcaaagattactctaattccaagtaattttaactattttaagttaccacatgcctactgtattaagaagtttatagaaactaagacagacactgtccctgtgcttaaacttaagccaggctttccagcttcattcacttagagcacacccctttagtctccatatgtcagtagcagccacatcagttattcagcactgacatctgtctctggggccaatagtcttgctcttcaaggggaaaacagtcatttctcccttcaaagtgattttaaaccatttgcctaaaaagcaaacaaaaactttgtacataccactccaatttttagccatcttgaacatatttgcagctctggtatacatttcacaagcctcttctattcttgtgtttcctctgagaaaaagttaaaaattagatttttaacaaccatccacatctctaattctccctccctcaaatgattaacatttagtatatacttgctatgtgccagacaagcattacagaatcttaacctctatttaaaggagatactcttactatacctgttttccagatgaggaaactggggtgttaagtggtaaagtaactagcccgaggtgacacagaaaggatagctcagaattaagactcaaacacagggcagggcatgatggctcatgcctgtaatcccagaactttgggaggccaaggcgggcggatcacctgaggtcaggtgttcgagaccagcctggccaacatggtgaaaccccatccctactgaaaatacaaaaattagctgggtgtggtggcatgtgcctgtagtaccagctactcaggaggctgaggtaggagaattgcttgaacctgggaggcagaggttgtagtgagctgagatcgtgccattgcactccagcctgggcaacaagagcaaaactatgtctcaaaaaaaaaaaagactcaaacacagatctggctgaccccagaaccagaggtgttacaaactgaagatgttattctgattacatctttaatcagagtccttcccatctataaaagctggaagttttatatcagtctgagtagttaaaagtacgtttttcaaaggagattaaattttgaaggataaagacatctttaccctgttatctcccaagagttcagcactatgtttattcagaagccacgtcttatgagaaagtggcacgacattctacagctgtatgatgtcaactctggtaagggcaagtccttctccaacctggaggaagcctcagggtccggcccagtttagaaatgcattttgcaacaccctgagaaatgcattttacaacaccctgagagaagggtacctccactgttgcttggacatatacagttctgcaaagttctttaccaagcagctgattccactgagggacagctttaagctacttggaaatttcttctcacataaaagccaaaattatcctccgtaatcctcccagagttaactttgcttttactatgctaaggcccctccatgaaagacgtttatctatcttgtctatttataatcataaaataaacagtggaaaactgagatgcagcagactctgtacagtatacataacaaggaactcggtggggtatggacataaggactcagagacaggacaggtcaaggctgacactggatgctgggcctggtatgaacacatgtacatgaaagagtgcacacacgtgttaggaactccattaaactccaagctccagcagaggagcttgcagctccctgtcaacacaagtcctagtgcagagcagaggctgggcatacagcaaggctcaggtgtgactcagaccttaggcaataactactaacagtatggccctggaccagttctttaactccttcacacctcagttttggcatgcgtaaactgaagataatgtatacctaggagttattatgaggatcaaaagaaataatccacatacagctgccactgcagagcttcacccagagcaggtactcaatcagaatggttatcatatctagatccatgtatggaaggcataaaaacctttgggaatattacattgtatgtctcatgaggaacatgtatctagaataaatgcaaatcgaaaccacacatgtgataccacatggctcctgctaggatggctaggatgggctactgtctgtcaaaagacaaaaaataacaagagtcagggaagacgtggagaaaccttatatatgtggagaaaccttatatacgactgggaggaatataaaagggtgcagccactttggaaaatgttaccatataacccagcaattccattcctaggtacacacccaagagaaattaaaacacatcccggcggggcgaggaggctcacgcctgtaatcccagcactttgggaggccgaggctggaggatcacctgaggtcaggagttcaagaccagcctggacaacatggcgaaaccccatctccactaaaaatacaaaaacaattagccagtgtggtggcacatgcctgtagtcccagctacttgagggactgaggttacagtaatccgagatcacaccactgcactccagcccaccagtctaggtgacagagcgagactttgtcaagaagaaaagaaagaaagagagagagacagagaaagagagagagagagaaagaaagaaagagaatgaaagagagagataaagaaagagagaaaacgcatatccacacaaaaacttgtatgcaactgttcacagcagcattaatcataatagctaaaaagtggccaggcacagtggctcacgcctgtaatcccagcgctttgggaggctgaggtgggtggatcacttcagggccaggagtttgagaccagcctggccaacttggtgaaacctccatctctagtaaaaatacaaaaattagctgggcatggtggcgggtgcctgcagtcccagctacacaggaggctgaggcaggagaatcacttgaacctgggaggcggaggatgcactgagccgagatagtgtcactgcacttcagcctgggtgacacagagactccgtctcaaaacaaaaaaaaagctaaggagtggaaacaacccaaaagtccatcaaccgattaacagataaataatatgtggtatacacatacaatggaatattaatgcgcaatatgagcagtcacagtgagattccatttatatgacaggtctacagtaggcaaatttttagagacagaaaacaggttagtggttggtagtgctatggtttgaatgtttttgtcccctccaaaactaaattaaaatttaatccccaatgcaacagtgttgggaggtagggcctactgggaggtgtttaggtcatgagccctctgctctcatgaatgtattaaggccactaataaaagagcttgtgaaagggaggttccattttctctggttctcttctaccatgtgaagacaaagcaagaaggccctcaccagataccagacgctggtgccttgatctcagactttccagcccccaaaaactgtgagaaatacatttctgttcttatacattacccaggctaaggttattgtgttacagcagcgcaaagcaggcaaagacatctagaggtgggagtgttggggaaaagcagggaggtgagggaaaatgacagctaaatggtacagggtttctttctggggtgatgaagatgttctaaaactgctgtggttgcatagccctgtgaataggctaaaaacctctgaattgtacattttaaatcagtgaattgtacggtatgtgtattaaatctcaataaaacctcctccccaacacacacaaaaaaaatcaaaaaaacaaacaaaaacctttggggactatgttacacagtgaaagatagaatggcaacaagccataccaaaaatgaagtgtcagaataagctacagctttctctcacaccttcatgtccctttccctccacttcaaatctacacattaaaaaaaaagaaaaacagctaataagtttcctaaatggaaaattcctcacatgaaaacattctcaaccttagccatacctcccttggcgtaaagtcttgctactttcttgggtcttgtttttctaaagagtactgggaatcttgaactgtaattatagttcaatcattcttattaaaggtttctaaataaaactagcttaattaaaatgtactttatccacttattttcagagacaggatacagctagaattaacagagttcctacattattccaggttttatgctagatatttccatatatgttatgtcattttcattattacaaccatgaaagacactatctctattttactgaagagaaaatggcatctagaggacaatggcttatccaaggctacccagccaaggtcagtagtgtacctgacacttgacttcaagttcagtgacctttgaactttgctaaaccatgagatcctcatgtctcctgaaacagaattgccagaggtagcctcactttaaaaacccatttgtcataaactgaccataactttaaaacttcctgaaaaaaggtacttttgaaattacaccggatgcttattttgttttatgtgaaagttaattttttgtaaattttatggacaagtattcagaatttgcattcaaagtaacaactgttatccagaggtctcacagtgaggcagaagatccttggaaaaaatattctgtggggaatccatattacgcagcaacataagttaaacacttagcactcaattgacattaagaagctaaactgagctaaattaactatttttttgtattacaggaatctgacttggaagaagaaaacattttccccaccgtgaaagaaaacactgcccagctagcacaaaaaccactgccacctggctggcccaggtgaaccacccttgcattccagaggcaaggcagactctcttcttcttgaccgtacttattcaggaaatatttactgagatccatatgtgccagaaaacactaaggaaataaacttcttgcccacaaggaggtcacgacactgaggaaagaatatcaagcttcacggccagaagggtctgagaaaaagcctatcaattccccatgttcccctgaggaaacattgtcaaagccacaaatgtcccaccaggagccagtgaacagcagagctgtgaaaaccaattcatcttcaaataatctaaaatcttgatttcccccatcctgaataataactattgcagagcattgtaaaactatgacaactatagtccgtactattttaaaactgtgggtgggaggaaggagacatcgtagaattgtgagaactaatgacacacacatcatgagatgtacctcaaagaaaaaggctgacaactcctgagatagaaataaagttgcctctaaaatcacaagatattagagtagaaataccacaaaaagtgacagtgacagtactatgaagataagcatgtagaaccagaggcaaaattcagctctaacatcaggatgccatgaaggggtgtgtcaagccaccccaaaagactgaaaagggacttgcccagtgtggggagcctggggggatccccacaaagcatggtacctccttcttctcattatttaccagcagtatctccttagccactagactgatgctctggggaagaggaagcagcacagggcctagcacacaggccacaataacaaggctgatgcttagtgtctggatggaacaaactgtccacattcattttttaaggtttcccatgtatgcctcaaaataataagcaaatgtagaaagaatccagaagagaggaaaattcaaaatctgtctgaacgtgcctctgccatacacaactactctgtgatattataggctctataaacaatttatttccacctgatgcttcacttctggaaactccacagattctaaaaacttggggctttcctaggtaaacttaacccttccaagattactttatttcagtgcttaatatattttaaaacagtacaaatcttttatgtgatgcaaaagtagagatttcttccgtggaggagatgcagaggccccagaaggacacaaaacaactggaagagatatttttacatgttctcaacacaaagaaatgataaatgtatgaggtgatgagtatgctaactatcctgatttgatcattatacaacacagacgtatatcaaaaaatcaaactgtaccccatcaatatatgcaatacaatgtgtcaattaaaaactatttttttaaaaaggtaggagggagatactctccagaatgctaatttgaattcttacagcaaaaggcagcatttaaatgtttcactgttcttttataaatcggtaatgcagaagcccaaggtatggtggaaaggcccagggcatgggcttgagtcagaccacctacaaatgaacagtatcatttatttaccagcctccagttccctggagcagccaggcctgtcttggccttggagagaaagaaaaattccaccaagccagctagcactgtaccagtaaggggagcgctgtctcagtggccttgagcttttggaatcaattttctaagaacttttcagtttacttctgcttaattaaggacaaaaatcatagattctcaaacagagaaaataatcagagacatttaaggcctgtgaccaaagtatttgtgtttaagcacaatttcctgaaataaagcttatgagaacaagtataacaaagaaaactagttagactttattttgacaatagttttctaatgcctcaactttatatggggagtagtcatctttatagagaagaaataggtatacactggacctatttataaaacaaaacaaacatatttaaatacttaagaaagataatggtaactgctagattaattcagaaatgactgttacatacaacctgatttaccaagagcagtttttaaattgaatttcagtctttataaaaatttaagctgaatttcagtcttcagaaaatactgatgagacatgtgattcccaaaaaatcatggtggctgcttagataaatatatccacacatcctccaaaaaccttatagatcaacaaaaagcatacacaaccacccataatccgtgcctacagcaaaaggaggcagtattcagcaagcctccattaaatataatttaggaaataaaaaatccaaaactaccagagctagcaacactgcctctgctgccagtcagaggggcgtctgtcgacaggagaggggagtttaacctggcaatcattgtccagggaagaactctcagcaaggaagtgccctaccagggtgggcaaacaccccagaccaggtggaagacctggcaggttagagcactgcagttgggaactgaatagaagggctttgccacaggctgcagtttccagaagacactgcttctgggagaaggcaacttagaaggtgggggcagctctatggaggtttggcagtgaaaggaaagaaggcaagtgatggaaatacgttcttgaaacaaaagagtatcacagaattagaagtcacacaaacctacccctccacagcaccattcattaaagaaaccgcacttaactgtacctacacaacgcagcatttaaactaagaaacccatgaagtcacacaaaccgctcatctcctatcacagaaacacatgctattgtgtgtccaagaaactctgtgactctctacactaaacagaaaggagaaacagcatccatatgaagctactacataagaaagaagatcctaagtgaattaatgcaggaacagaaaaccaaataccgcatgttttcacttataagtggtagctaaacactggatacccatgggcataaaaatggcaaccgtagacactggggacactagcggggtatggggagagaaacagttgaaaaactattgggtactatgctcagtatctgggtgacaggatcatctgtaccctaaacctcagtatcacacaatatacccagttaacaaacctgcatatgtaccccctgactctaaaataaaagttgtaaaaaaggaacaaatattaaaataaaaatgagccataccaaaaaagccccaaaacaaaaaagaaacaagaattaaaatacgttccctaaaacaatcacaaggcacaggaaaacaattccatatgactgaaatattattaaacagatatgaaagtacatcataagctagaaatttaaaaactcatcatggaaatacacaaaaaaataagatgatgaactcttgtttcaaattctagaaggatagaaataaaaagacaaaatgatctcagaaataaaatctctgttatagcatacctaaggggaaagcagattctactgacaataaggaaaactatgaaaacagccaagagaacaaaaatgaagagaaaaggatctaagtaaaagtaatacaggatgggcaaagagccaatatccatgtaatgagagtccctaaagaggggaagaaaaaacccattttcacaatctgagaaaattttctggaaacaaaaggcatgaatcgaaatactgaacaggcctacatgtacttggaaaactgacccagaatagtctactgtgaaacatatcctagtaagatgactagattttataaatgaagaacatttctgggcttccacataaaaactcaaagttacttataaaactaagaaaatcaggctaagacttcaacagcaatatacggagcaaaacaacagtggaacaatgctttaccagaaactcaagggggaaaaaagtgtgagccaaggattatacaaccaggccatccagcatgcaacccccagtgtaagccaggacccaagggataactaagagatgactaggaaacatagctgaaatgactggtggtgtcactgcatatgttgtattgtagatctaagacaaaatgtaaggacaagggtagaaaaataatagggaaacacttctatgtctgacaaagtacaaacagcttaaaaaaaaagggatattagagaacaagagatgtagaacgtgctcactgagaagcacataggtaacaggagttttctggagtgaacaaaataataggcgcctaagtaaggaaaaggagctaaggatatttaaaaacatttatagcataaaggtaaccagtagaacaaaattacaaaccttcctaaataaaaaaagagacatgaagacaaatagcaatgaaaatataatatacagtaaatatagtagtatgacagttaagaaccaatcatatactcgtcattttcagatctgctcaaaaaacaaaacccaactttgtgctcagtacaagaaacacaactaaaatacctattccgaaaggcttaaaataaagagatggtcaaaagtataccaaacaaatcaagcagctctcattagaactgtcataacagcaaataaccctgacatctcccaaaggcttctctcagtcacttgacttgtttactgcagactggctgtgactgctgcctctttctccaagtgtcatcattctctactctggaatgtagcacttatccggtatatatactcttcttaatttcttacagaagggtaaaagccatggcagaagtgccttccactcatacttcatcagtcaaagtcagtcacatggccacaactggcagcagagggcacaaggtaacagacagcatgtatgatcctcttacataatacagtcctaaggaatgcaaacacaagcagtaagaaaacagagattgctaccctgcaatgaaacaaagtagaatttgggctcaaaggctttaaatgaaataaagaagttcacttcataatgctaaaaatataattcataataatattagttgtgaaaatctatgtaccaaaaacacagtagccccctttataaagcagaaattgcaaacgttaaaaaagatagaaatacacttataagaaagcagatattaatatgccccccaaaacagatcaagtgaacagaaaatacagacatgaaagacagagacaatataatcaataactagacaagagggatctctatcaaaatttgataagaaaatatccaccttctaaagtatacatgggagattacaatcccagcactttgggaggccaaggcaattggatcgtttgaggtcaggagtttgagaccagcctggccaacacggtgaaaccgtgtctctactaaatatacaaaaattagccaggtgtggtggcgtgtgcctgtattcctagctactggggaggctgaggcaggagaatcgcttgaacctgggaggtggaggttgcagtgagccgcaccactgtactccagcctgggcaacagcgtgagactctgtctccaaaaaaataaagtgtacatgggtgctgggtgcaggtggctcatgcctatgatcccagcactctttgggaggccaaagcaggaggattgcttaggccaggagttcgagaccatcctgggaaacacagcaagattccgtgtcgaaaaaaaaattttaagtaaagtgtacctggaccattcatgaacaccaacaatatattaagtggcaacgaaaatctcagtaagttctctgatcataatgaaaaaaaaaaagtttaagtaataatatacaaagaaaggccattctttctacctggaataaaacccttacaataaaagcctcttgcaacaaaggggaaacaaactaagataaaaacattatgtaacaggatctataaaatacaactgaagcagttttaagaaaaaaatgtatagccatgaatattttaatccatacaaataaagcaatgaaaacagtgaataaacacctccctagaaaaatgaaccagagggaaaaacaaaagaagccaaagaaagcaataaagataaaagtataagtcagtaagacagaaaacacaaaaccagtagaacaaatcaatcaaaatattggttgtttagagaaaaagaatcaaggaaaaaaggggaaaaacacaaacacaaaaataaagtgacagaagaaaattactaaaacagaacatttttaaaagtcagaaaagactactatgcacaatgcaaatacattttttaaaacttagataaaatgaattatttcctaggaaaacacaatttaccaaaattgacctcagtagagatagaaaatttaaacattacaaactccagagacaaaaacaagaaagttatcaaagaaatacccatcaaaagccccaatggtttcactgtggtatattcttaaatcttcaaagaccagagtccaaaaaaaaaaaaagaaaaacatccacattatttttaggaggcacctgtaacagcaatacttcaagctgataaagtaaagctatatacaaatgaattgtagataaaacaatcctaaatcatgtatgtaaaaacagaatctaggccaggcacagtggctcatgcctgtaatcccagccctgtgggagaccaaccaggcagatcatttgagcccaggagtttgaaaccagcctagccaatatggtgaaaccccatatctaataaaaatacaaaaattagctgggcatggtggcctgtgcctgtaatcccagctgctgaggaggctgaggtgggaggatcacttaagcctgggaggcggaggttgcagtgagtaatgagcacatcactgcactccagcctggtcaacaaagtgagaccctgtcgcaaaaaaataaacaaataaataaaaataaaaatggaatctacatttaaaaatatattataatcctgagaggtttactccaggagtgcgaggacagtacaatacgaggcctcatatttactaattaacatataataactcttaaggagaaaaatgtttatctccgcagatattcaaaaaggccttcaaaatacaacactaatccctaatgaatacacggactaaaactggaattgacagacaagtcctcaccatgaaaaaatataccttaattcaaggaagtattgacttattagattttgttattacttataagttccacttaaatacagaaatagttaacattctgaaactctacttccaagtttccttactgtgaactttattagtcactgaaaattctttgaaggtacaaaagctttactgattttataaccaatcagataaacacaatgtgaaaatctaagaagagtatatgaagtctgtaactagggtgattctgtgtcctcattgcatagatatgcttgacttgtacccattttattagtatctcaaaaatatcacaatttggacaatatattctctttgactccataactcacaaaaatagaaaaatatattaaaaaaattttaagtataatattttgattagcttaattattcagcattaattcatacatgaattaagatttaaatatgctgtttatatataaaaggtaatagagattgagacataactaagtaaaatgaggaggtaaaggggaaaatgtaagaccatgtaagttataataaatttttcatcatttttagcaaaatcaacagatactgtctgaaaatcaagatatcaggaagtagaagtgctctaaaattatttagaaatatggtggtaaccatcagaaaaactaatgagaaagttaaaaatggttgcttcttgggagtgagattacgtaaaaagaagactcagagaactttacttttcaactgaaaactctctgcgctgggcacggtggctcatgcctgtaattccagcactttgggaggccgaggtggacggatcatgaggtcagaagttcaagaccagcctggccaacatggtgaaaccctgtctctactaaaaatacaaaaattagctgggtgtggtggcacccatctgtaatccaagctactcaggagactgaggcagcagaatcacttgaacccaggaggcagaggttgcagtgagccaagatcatgccactgcactccagcctgggcaacagagcaagactccatttcaaaaaaaaagaaaactctctgtactccttgtacttttctaccgtgtacagctacaatgttcataataagcaaatatttaaataaaatgcctagtacagtggctaacacctgtaatcgcagcactttgggaggctgaggtcagcagagcagatcgcttgagtcccggagttggagacaagcctgggcaacatagcaagaccctgtctctacaaaaaatacaaaattagtcaggcatggtagtgcatgcctgtagtcctagctacttgggaggctgaggtgggaggatctcttgagctcaggaggtcaaggttgaagtgagcagatatctcgccactgccttccagcctaggcaacagagtgagagctcgtctcaaaaaaataaatacataaataaaacggaagaaagcgacttaaactctcctttacttggtatagctttgctcttgaaaactaggtaagaataaaagaaaaaacatcagcatttgtattagcattaatacattcattctctccaccaatatttaccacgtgcctaacgcatgcctcaggctgggtgaggtgttagccacagcaacaaaacaggcagacttccaaggagccacatatgattactggccctccctctctccagagtaactgcacctcacagagctcacaagaatgaaagaatatgtggagaaaactgcaaaaatgcaacaagaaaaaggccagtctggtaacagtttatcatttgataccaagctgtaacaacctaaaatcagaaaaccaaacaattataataaagttatatagctctgtgcaactgaataagcattctgacctcattcaatccttaacaatcgtgaaaaacagattctgtctctctgcccatctgaaaactaaaaaaaacaagttctgagtatgatttacttgactatagtcaccaaaatagtaaatgagagaacttgagcctctacctggtctccccatgaataataatataattatatttcttacgtatattatataatttataaaaataattgttcaatttataatcgatttcttttgagaaagatacacaaatatacgtatatatttcttatactgtatcacctgtctctgtcagtaaacctgagcctaataatttttttaaaagttcaatctgcatttgaacaagaattgtaactgaggaaaacctaaatgcttcacctatgttatcacatggccccaccatattttggccaaacttaaaagcaatctttgttgaaataaacacaagtgaagaatactgataatttacagtctacaatgcttaagaaatattcacaattttcacaaacaaccaacaaattatagattcataattatttcaagataacccaatggggcctttcattaaatttacattgacattgccaaatttgtagctcttgtgtaaactcagactaaacactgaaaggcaaaggaagacagcattaaccataaagaacatctttccactggcattcttttttttttttttttttgagacggagtctcgctcgggggcccaggctggagtgcagtggcacaatctcagctcactacaacctccacctccaaggttcaagtgattctcctgcctcagcctaccaagtagctggtattacaggcgcccgccaccacgccaggctaatttttgtatttttagtagagacggggtttcatcatgttggctaggctggtctcaaactcctgacctcaagtgatccacccgcctcggcctcccagagtgctgggattacaggcgtgagccactgcacctggcctccactgtcagtcttaagcactttcttctatgtgcattgtgcaggttattcccaaccgggtctcatagcaacaagatggaggggatagtattataagaggcttttccaattcaaaactatcttaatgtcagactcaggccgatttaaaatcataccagtagttcattaacattataaactggaatttgaaattaactacaaaattccatagctcatccctggcaacaaactaaaggacaagacaactcctttggaagtagttttactaaacgtactatactacaaacttgagaaaaagttttaattccacaactacaaaagcacattactgcttaacgggcaattaagcagaaacacaaaccaccacaacagtggtttcctgcaatgtttgcatcccttgtcagctcttttcctggggaggaaggtggggatgggaaaggaatattgataccttacctatcaagcagataaggcagaggatttgtgccttacacagagaagaaatatttgactgacatgttctcataaatacatatgcatattttcatctaattttactgaaagcaagaaacaaaagctatagaatactactaagaatacagtattgccacaaaaccactgtgagtggtaaacactagagaactcatgacaggctttaatctgcagatagagcattcagaatgtctgtgatgtgaaatatctgcaatatgccaagcagcttttaatgactgccacaacctgaaaacagatggcttatcctctttaaagcaccagctagtcagctcttaaatatatgagctctgatgatattcaagtcagtatgtgtgttttattaattttgtattacattaattctggagtctgacatagagatggattactctgcgttttaaataaaggattacatgcagacctttaggaatgaaaatggtgacattctatagctaagaaggcaggggcagggtggaataacatgtattccagtctagaaaggtgatgatacatgccatctataaggtaggattctaaacatctaaaattgatacagaatcttaattgtcctactgacacaggaacactacgtctgttttctggcttcagtaattatacaatattactaaactcctaaaattctaagtactcttcttcctgcaagctttcctggagcaagtattactggaaataacagtcttcaaagtataaatcacacttgcatggtacattaatggttaaagctctttcagatattttatttcattaaaagatcaatgaggctgggcgtgctggctcacgtctgtaatcccagcactttgggaggccaaggcaggtggatcacgaggtcaggcattcgagaccagcctggccaacacagtgaaaccccgtctctactaaaaatacaaaaaaaaaaaaaaaattagccgggcgtggtggcgggtggctgtaatcccagctactcaggagactgaggcaggagaatcgcttgaacctgggaggcggaggttgcagttagttgacatcccgccactgcaatccagcccgggtgacagtgtgagactccgtctcaaaaaaaaaaaatcaatgatgcagtctacggctctgaaattctggaaaagttatctgtttggcctactgcttctttgataaataactggagctgataattttgatgaatatgctaattaatatctcatggtcactgtctccaacatccatggttccaaatgttttataaacataacctcactgaactcccataaattttgagatatactattattgtctccgttttatacactggaaactgaagcacagagaggctaagtaacttgccctaggtcccaaagctagataataaaccaacctgttgtacccaggtaagaactaagatgcattaacttttgtgtaactgagtgtgaatggtgaagattcgtcttcttatatgtcctgtcaataacataggtagcaacatttaaaagggagatgtttctttaaaaacaaaggcttttcaaaatcctttaaggattataagctcaagatttggcctagtttcctaaaaacatcgaaaacctctttcccaaaaggagtgttctcctgagacaagcaccaagtgctgtcaagctttttcctctgccagttacagactctcccacagggaagcacttcctgacttgaaataatgttgtaacattaaaataacctcctggcatgaggtactatgacattaaattttattagagtgaattttaaatgttttgtgaatcaaaacatttaaaaggagttagtgtggcgctagcacttgatggtactgtcataacttttaaatgcaaaacaaaacataattcatagctatatctcctacacatcacatgagaaatttagaaaccagctgtgataaacgtcctctgagaggttcctgaggacagggacccttatcttcttgcatttttgcagcctttatgcatttctgcagttatgcgtactgcatgcaacttgtccttaagcatttcctaaagacgtatcaatagcggtaaagtattataatttatagccaaaagaatgaagttggcaaaacaagctaagagcccattatgtctgtcttctgaaatagagtctgaactgaatgtgtacagaaataaaatcgtgtctagtcatgcaatgggttaagtatctgctcttggtaacagcaaaggatctttcactttcaaaagaaaacaacgaaacaggcacacacaaaatttctgcctttctcatcctaaacagctgaatcattcacatattcaacagcccagaattcttccgggctgtcagtgcgggctctgctttttgagaggttggaatttaaaatcctccttaggagagcacggaagaattacaggaaattaaagggattcccaaaggacgcctgacttaaacagcagcagcgttaccgttaatcaaacaggaggctctggctatcaatcaatctccggagaaggaaaaatactatgctgagaaaatatattcgttcattagtcaagtatttactaaaggtgtactcggcgcaaggcccctggagagaggccaacaagcacaccagctctggatccctcgccggaccgccccctccccggcggggcccacctgcaggcgggacgcccccaggtgcgcgttccaggcgccgggggcggcccccgcacccacccctccggctccaccccggcgcgcctcacccggaccggtctcaggagcgatacgggcttcagcgtggcgaaatgcaccaatacgactcgctacgcactgagaagggggccccacgcgcgccccgagctaccgcgcccgcgggcctcagggagccgctgaccttctaggtcgtgggacccccgcaccaacccgggccagggcgaggggggcgatctggggtctccagagggcgcgtgaggctgacagccccccccccagagtgttctaggggcttcgtggggcgcttggggagctctgggggtcctaggggttctctgaaaggcgcgtgggggctgagggtccctgtgagactctggggattctaagggggcgtgttaggggatccggagagcgtgtgggggctgaggaaccctggggagttctgccggccctagggggtctctaaagtgcgcgtgggggctgagagcccctgggaggatgcggggtttccagggaccctgggggggcctgtggggtctctggagggcgcgtgcggactgagggcccctgggcgtcctgggggctccagggggcgctgggggaccctacaggatttctggagggcgcctgcaggctgagggcccctagacgtggtctgagggccccagaggttgcgtgggggactcggggggtcagcctgaaaggaagggggccaagtacggagaccccccccccccagggcacgcacggtctggcgctcacccaaacagccctcggaggaaggagtgggaggccttgactcgcttctcggcctccgccatcagctgtactgcctcacgctccttccccgcgttgtccatgtcgcccgccgcggccgccacagccccctcagccggctcgctgtgcgcccaggcgccttaaccctccctctggcggccgcagggacgcaggcgcaggcgcgacgcgcgaggcctttcgggagctgtagtccgggtcctgtcatggcggcggggattcgcgagccgcctactacagttcccaggaggccccggggcggggtgtgtgtgagccgagcttgcgcaccgctagctcccaggacgtcggcgcagggggcgtgacccccccaaaggggtcctgggccaaggtgaactttaattttgtatgtatgcagaaatggaaaaatgatccgtggcctctagtaaagatcacctcctcagtaagactcgcatggcaatgggatggatgaaggaacaggggataacagattggatggaacccacacccttcatgcaagttctgcaaaagagaatctggtgtagccaccaaagcatcacatgcttgataccgcccaccaaaaaacgagcaacagctggcaataagagccatttttatctccaagagcaagacgtccccaatataagttcagttatttttaaatctccccaaactgtaactttctgttggtcctctcttccttggttataaatgagttgcatatatgcaatatatgcataatccactcttttgttgactgaattatattcaatggatgtgaaccattgaactcttatcctttacataatactggccatagtggatggatctccagggacaaaatgtttgcctgccaggaagacttctaatctcctaggagaagtatccatagatagatgggatcctgtgccagagactttcaggcctgtcccagagggagttatttttgaagacaatgtctagaccattcaagcttggcagtgctaaggcagagatgctgaaactaataagaaaatcactgccaagtgagatttatgacagtttcaaactgttaataaatacactctgggcactggcatgcaaaattttagaaaatgaagactgtctgtagagggcaaggcaagaggggccaaactcctagaaagaaagttgactaaagcacatgtcacagagttcatacatttcaggactccgtagagatagaaagaaatctcagctcttcgtgcagtttatttacgattactacatgcattattctaactttgaaaagctgagctgtgtgtttttggagagagaaggaggcgggaaattggaggtgaccgtaaatgcaggggagaccagagaaaaactgtaaaaagtgaacataagcatttggaaagcagagcagtctatgggggcttaatggagtgaggctaagtcaaaagctcctaagtaaatcagtgtgttgattaaatcagttgttccctaacgtggttcgatgcagaagctctaatggatatttaagaaatactgattcctaggccactgggttttggtatcaaggtctcttgcagctggggtctagaaaatgcacattttgaaaagaactctccatccctatcctaaagcacacagttctagattctcatatctgtagtcagttgaaaaggagctggaacagactgcctccccgaagctagcacttgcaattaagagagacatttttggtggtttctagtaatttccttcattctcttctttgtcacaggaaatttgtgggcactcccaccgttctgccagtccacaccaaagtgggagaaaaccttcaaaccttaattactgggtagagctagtgttttattctcccaaaggctgggggaggaaaggaggcagggcagagagatgaacctcacagaataaggcctgactagagagacagctgaggaatccttgaaacaagaaggaaaaggaaaggagaagcacccctggtgtggatcaggagaagaatagaagtcatcttggagaagagccaaaggacccactgcccacacctgcgctgcccaggatggagccactcaccactggtggctatttacattcaagttaaataatattaaataaaatgtaaagttccatttcttggctgtactagccgtatttcaagtgctcaatagccacacatagccagtggctactgaaagagttataaatatagcatcctggtggattgactaagttagacacctggtggattgactaagttagatacttgagggcggtggctcacgcctgtaatcccagcactttgggaggccaaggcaagcggatcacttgaggtgagtagttcaagaccaacctggccaacacagtaaaaccccatctctaccaaaaatacaaaatttacaaaaaatacaaaaattagttaggtgtcgtggtgcatgcctgtaatcccagctactcaggaggctgaggcaggagaatcacttgaacctgagaggtggaacagaggttgcagtgagccgagattgcaccattacactccagcctgggcgacagagtgagtgagactctgctcaaaaaaaaaaaaaaaagttagacacccaaaaaacgacaggtgcaagaagattattttgactttttcttttcttttttgcatacagaatacacactggacactttgacctcttgtttctttctttcttttttttttttttttgagacagagtttcactctgttgcccaggccagagtgcagtggctcactgcaagttccgcctcccaggttcacgccattctcctgcctcagcctcccaagtagctgggactacaggcacccaccaccacacccggctaattttttggatttttagtagagacggggtttcactgtgttagccagcatggtctcgatctcctgacctcgtgatccaccagcctcggcctcccaaagtgctgggattacaggcgtgagccaccgcgcctggccccaacctcttgtttatttaaaggcaagagatgaaattcccatatgaaagatgtccctcttatactagaactaaagcaacattcttatcatcaaagacaggaagttgaggctaagagaattctgtacaaaccctattaaactaacccttatcttcttagtcacttttctatccaattaactaccctagcccaagcccctctgcctcatcacattttcagtttactattctttgtccaattcagtaaataagtaacacactctaactgcctctttgggttttcatttccttatgaggcctcccatgccatgtaaaacttgtatcaaatacacctgtgtgctttcctgctattaacttgtcttatgtaagtttaattttcagactccaccaggagcctgagatgcccccctacactactatatggactgcacagacagagaacaattttatcattccacaagtcctagtggatggcactagcctctatgtgctttgcttttcagaagttctggacacttgtaagaaaagaagaaaaaggcttcagggagtttctgagaaggcagagcaggaaaggagcgtagcctgaacaaggcagagccaacagtactgctggcttttccctgtgagaagatggaggtggacacctggacactcagactgaatcagcacataccccgaaagatgatccatcaagacagggctgaagctacttgagaaccccaatactaagaaagccagagtcagaaaagaacagaatcgatatggggaaagggtgtagccatctgtgtgtgttcacagaaggggagaaagcaccaggcaaagatccagtatggaaaattatgggacatcactgctgcttcactgaagcaaagcaagaaggctcacccacattaaaggggagggaaatgagacgacatctcctgatgggagggcctctgaggatttgcagatgttttcacaccacgacagctaggttagagggagtccgtgctcaccctggtccactctggttgcattgacaaagttgggaagctggagcccctacgctggcgttgggggacagccttcagctcacatggccctgcatggcatggcccaacggtccctgcccaggtctgcagtggccttctctgatgacatctcagccttcgttctgcctgaaatgctaagcgtggctcagagtcatcggacaaggtcaaaccatctaaagcagagtgttctgcttcagaaggcagggaaggaagaagtccatttcaggaggctcttcacccaaaatcgttaaaggaatgcattaatgaaaataaatcttccatctgtgtggatgaggttgtgcaattctaaggacagaatttaattgttctatttacagtgattcttttcatttttctcatagactaacaaaacccaagaacatttgaatggcacatttcagagaaataattaaacagcttttgttaatctctaaaaaactttttgaaacaacatcagtttaagtgtttgtgtgttatgtgtgtggggtgacatttcacaccctgtgaaaactgttacaagtttccccaaatgtaactttattaatcttatttaacctttccttaaaaaattactctataaaattcagaccaaaaagttagaaaaggtaaaattaaatatacgcaaatatctgttacagaaaacaaaaaatggtaaattaagttaaaataaatgcttatgagaaaatatatattattgtcattagtaagtgctcttcttcttcttcttcttttttttttttttttttttttttttgagacagggtgtcgctctgttgcccaggctaaaatgcacaatcaggggaggagccaagatggccgaataggaacagctccggtctacagctcccagcgtgagcgacgcagaagacgggtgatttctgcatttccatctgaggtaccgggttcatctcactagggagtgccagacagtgggcgcaggccagtgtgtgtgcgcaccgtgcgcgagccgaagcagggcgaggcattgcctcacctgggaagcacaaggggtcagggagttccctttccgagtcaaagaaaggggtgacggacgcacctggaaaatcgggtcactcccacccgaatattgcgcttttcagaccggcttaagaaacggcgcaccacgagactatatcccacacctggctcagagggtcctacgcccacggaatctcgctgattgctagcacagcagtctgagatcaaactgcaaggcggcaacgaggctgggggaggggcgcccgccattgcccaggcttgcttaggtaaacaaagcagccgggaagctcgaactgggtggagcccaccacagctcaaggaggcctgcctgcctctgtaggctccacctctgggggcagggcacagacaaacaaaaagacagcagtaacctctgcagacttaagtgtccctgtctgacagctttgaagagagcagtggttctcccagcacgcagctggagatctgagaacgggcagactgcctcctcaagtgggtccctgacccctgacccccgagcagcctaactgggaggcaccccccagcaggggcacactgacacctcacacggcagggtattccaacagacctgcagctgagggtcctgtctgttagaaggaaaactaacaaccagaaaggacatctacaccgaaaacccatctgtacatcaccatcatcaaagaccaaaagtagataaaaccacaaagatggggaaaaaacagaacagaaaaactggaaactctaaaacgcagagcgcctctcctcctccaaaggaacgcagttcctcaccagcaacagaacaaagctggatggagaatgattttgacgagctgagagaagaaggcgtcagacgatcaaattactctgagctacgggaggacattcaaaccaaaggcaaagaagttgaaaactttgaaaaaaatttagaagaatgtataactagaataaccaatacagagaagtgcttaaaggagctgatggagctgaaaaccaaggctcgagaactacgtgaagaatgcagaagcctcaggagccgatgcgatcaactggaagaaagggtatcagcaatggaagatgaaatgaatgaaatgaagcgagaagggaagtttagagaaaaaagaataaaaagaaatgagcaaagcctccaagaaatatgggactatgtgaaaagaccaaatctacgtctgattggtgtacctgaaagtgatgtggagaatggaaccaagttggaaaacactctgcaggatattatccaggagaacttccccaatctagcaaggcaggccaacgttcagattcaggaaatacagagaacgccacaaagatactcctcgagaagagcaactccaagacacataattgtcagattcaccaaagttgaaatgaaggaaaaaatgttaagggcagccagagagaaaggtcgggttaccctcaaaggaaagcccatcagactaacagcggatctctcggcagaaaccctacaagccagaagagagtgggggccaatattcaacattcttaaagaaaagaattttcaacccagaatttcatatccagccaaactaagcttcataagtgaaggagaaataaaatactttatagacaagcaaatgctgagagattttgtcaccaccaggcctgccctaaaagagctcctgaaggaagcgctaaacatggaaaggaacaaccagtaccagctgctgcaaaatcatgccaaaatgtaaagaccatcgagactaggaagaaactgcatcaactaatgagcaaaatcaccagctaacatcataatgacaggatcaaattcacacataacaatattaactttaaatataaatggactaaattctgcaattaaaagacacagactggcaagttggataaagagtcaagacccatcagtgtgctgtattcaggaaacccatctcacgtgcagagacacacataggctcaaaataaaaggatggaggaagatctaccaagccaatggaaaacaaaaaaaggcaggggttgcaatcctagtctctgataaaacagactttaaaccaacaaagatcaaaagagacaaagaaggccattacataatggtaaagggatcaattcaacaagaggagctaactatcctaaatatttatgcacccaatacaggagcacccagattcataaagcaagtcctcagtgacctacaaagagacttagactcccacacattaataatgggagactttaacaccccactgtcaacattagacagatcaacgagacagaaagtcaacaaggatacccaggaattgaactcagctctgcaccaagcagacctaatagacatctacagaactctccaccccaaatcaacagaatatacattttttttcagcaccacaccacacctattccaaaattgaccacatagttggaagtaaagctctcctcagcaaatgtaaaagaacagaaattataacaaactatctctcagaccacagtgcaatcaaactagaactcaggattaagaatctcactcaaagccgctcaactacatggaaactgaacaacctgctcctgaatgactactgggtacataacgaaatgaaggcagaaataaagatgttctttgaaaccaacgagaacaaagacaccacataccagaatctctgggacgcattcaaagcagtgtgtagagggaaatttatagcactaaatgcctacaagagaaagcaggaaggatccaaaattgacaccctaacatcacaattaaaagaactagaaaagcaagagcaaacacattcaaaagctagcagaaggcaagaaataactaaaatcagagcagaactgaaggaaatagagacacaaaaaacccttcaaaaaatcaatgaatccaggagctggttttttgaaaggatcaacaaaattgatagaccactagcaagactaataaagaaataaagagagaagaatcaaatagacacaataaaaaatgataaaggggatatcaccaccgatcccacagaaatacaaactaccatcagagaatactacaaacacctctacgcaaataaactagaaaatctagaagaaatggatacattcctcgacacatacactctcccaagactaaaccaggaagaagttgaatctctgaatagaccaataacaggatctgaaattgtggcaataatcaatagtttaccaaccaaaaagagtccaggaccagatggattcacagccgaattctaccagaggtacaaggaggaactggtaccattccttctgaaactattccaatcaatagaaaaagagggaatcctccctaactcattttatgaggccagcatcattctgataccaaagccgggcagagacacaaccaaaaaagagaattttagaccaatatccttgatgaacattgatgcaaaaatcctcaataaaatactggcaaactgaatccagcagcacatcaaaaagcttatccaccatgatcaagtgggcttcatccctgggatgcaaggctggttcaatatacgcaaatcaataaatgtaatccagcatataaacagagccaaagacaaaaaccacatgattatctcaatagatgcagaaaaagcctttgacaaaattcaacaacccttcatgctaaaaactctcaataaattaggtattgatgggacgtatttcaaaataataagagctatctatgacaaacccacagccaatatcatactgaatgggcaaaaactggaagcattccttttgaaaactggcacaagacagggatgccctctctcaccgctcctattcaacatagtgttggaagttctggccagggcaatcaggcaggagaaggaaataaagggtattcaattaggaaaagaggaagtcaaattgtccctgtttgcagacgacatgattgtttatctagaaaaccccatcgtctcagcccaaaatctccttaagctgataagcaacttcagcaaagtctcaggatacaaaatcaatgtacaaaaatcacaagcattcttatacaccaacaacagacaaacagagagccaaatcatgagtgaactcccattcacaattgcttcaaagagaataaaatacctaggaatccaacttacaagggatgtgaaggacctcttcaaggagaactacaaaccactgctcaaggaaataaaagaggacacaaacaaatggaagaacattccatgctcatgggtaggaagaatcaatatcgtgaaaatggccatactgcccaaggtaatttacagattcaatgccatccccatcaagctaccaatgactttcttcacagaattggaaaaaactactttaaagttcatatggaaccaaaaaagagcccgcatcgccaagtcaatcctaagccaaaagaacaaagctggaggcatcacactacctgacttcaaactatactacaaggctacagtaaccaaaacagcatggtactggtaccaaaacagagatatagatcaatggaacagaacagagccctcagaaataatgccgcatatctacaactatctgatctttgacaaacctgagaaaaacaagcaatggggaaaggattccctatttaataaatggtgctgggaaaactggctagccatatgtagaaagctgaaactggatcccttccttacaccttatacaaaaatcaattcaagatggattaaagatttaaacgttagacctaaaaccataaaaaccctagaagaaaacctaggcattaccattcaggacataggcgtgggcaaggacttcatgtccaaaacaccaaaagcaatggcaacaaaagccaaaattgacaaatgggatctaattaaactaaagagcttctgcacagcaaaagaaactaccatcagagtgaacaggcaacctacaacatgggagaaaatttttgcaacctactcatctgacaaagggctaatatccagaatctacaatgaactcaaacaaatttacaagaaaaaaacaaacaaccccatcaaaaagtgggcgaaggacatgaacagacacttctcaaaagaagacatttatgcagccaaaaaacacatgaagaaatgctcatcatcactggccatcagagaaatgcaaatcaaaaccactatgagatatcatctcacaccagttagaatggcaatcattaaaaagtcaggaaacaacaggtgctggagaggatgtggagaaataggaacacttttacactgttggtgggactgtaaactagttcaaccattgtggaagtcagtgtggcgattcctcagggatctagaactagaaataccatttgacccagccatcccattattgggtatatacccaaaggactataaatcatgctgctataaagacacatgcacacgtatgtttattgcggcactattcacaatagcaaagacttggaaccaacccaaatgtccaacaatgatagactggattaagaaaatgtggcacatatacaccatggaatactatgcagccataaaaaatgatgagttcatatcctttgtagggacatggatgaaattggaaaccatcattctcagtaaactatcgcaagaacaaaaaaccaaacaccgcatattctcactcataggtgggaattgaacaatgagatcacatggacacaggaaggggaatatcacactctggggactgtggtggggtcgggggaggggggagggatagcattgggagatatacctaatgctagatgacacattagtgggtgcagcgcaccagcatggcacatgtatacatatgtaactaacctgcacaatgtgcacatgtaccctaaaacttagagtataataaaaaaaaaaaaaaaaaatgagaaaaaccgaaatcatgcaccagtcgataagatgcaataaagaatacagcatcaaaaaaaaaaaataaaaaaaaataaaatgcacaatcaaagctcactgcagcctaaatctcccaggcgtaagtggtcctcctacctcagcctcctgagtagctgggactacaggcatgtaccaccaaacccagttgttttttaatttttatttttagtagagatgaggtcttgctctcttgcccaggctggtctcaaactcctgagctcaagcagtctttccatctcagactcccaaagtgctgggattacaggcatgagccactgtgcccgaccaaatattcttctttttattagttgatgtaaaagtctaaaaacaagttttgaaattaacttgatgcctttatttatggcaaatgggcataagatcattttgacaatttttatttatattatatattctaggacctttcttatctatgcttaatgtaagttaaatggttgtgagccacagacacaactgcttaaagggaaaaatggtttatttctcacatactctttgaattcctttcacatgattatttaatattacattaggagaaattttagggaaaaaaagatgctcataattctacctgctcaatgaaacatttttaattttttatacatatatagtgctatctcatttttatccatcaaacttacacatgtgtaagtattattaggagtatgcttgtagtttgtattttttgtttgtttatgaaacatatattttctctgttgctataagtgtttgtaattggttgttaatggccaatagttgaataaatcagatttcacaaaacctttttccacggtggcatatttggtttgcatcacatttggctcttatggaaacatctaagactgtcttggaaagtgaaataatttccccatcactagattacaccgtcccaggcttatttagggtgcggtactagcatttcttcattatcaggtgggaagaactgggtcttcgcaaatctactcttaacatggtagtaactgtctttaaaaacacagtcaacccttattattcatggatttcatatttgcaaactcacctacttgctaaaattaagttgcattcctaaaatcaacacttgtggcacttttgccgtcattcacagacgctcagagtgggcaaaaatgtgggtggcctgacacatatgttccaagctgaggtcaaatacagcagcaatctgccttcttgttccaactgttgttgtttttgtttgtttgtttgttttcgagatggtgtctcactctgtctaccaggctggagtgcagtggctcgatctcagctcactgcaacctacacctcctgggttcaagcaattctcctgcctcagcctcccaggtatttgagactacaggcacgtgccaccatacccagctaagttttgtatttttactagagatggggtttccccatgttgatcaggctggtctcgaactcctgacctcaggtaatccacctgccttggccttgagccaccactcccagccttgttctagctcttatattgttaatgtgtccttcttcacagcctgtttagtgccacgtttcacaattttgtattggttttttttttagaggtggggtcttgctgtgttgcccaggctgatctcgaactcctgagctcaagtgtcttcagccttggcctcccaaagtgttggcattacaggtatgagctatcacatgtggtttgagttttgtgctttttttggttggtgattttgctgattaaaatggccccaggcatagtgctgcagtgctatctagttcctaggcacaagaagactgtgaggtgccttatggagaaaatgtgtcttaaataagcttcattcaggcatttacaggactgttggtggtgagcttgatgacaatgagtcaacaatatatatttaaaagacacctctaactagagacacacataaaataaggttaaatattgatcaattgacagaaagtgttgtaaccagagactcaaggaaaccaaaccttgtgtttttcctgggcacaatggtttagcatttactacttccatgtttgcagagattttatagaagataccttctgcaaatgatgaaaatcagctgcacattgggacagtatctggataaagaaatgaaatgaagtcagatcatagaatatccctttcccaatccctaaaagaaatgggcaaaaagataaaaactagcagcttttcaagagaactaagacagagggaaatcatctggtgctggctaatttctatttgctccctagccccactggctaaccttctgttatggttaattttacgtgtcaacttgactgggccacggaatgcccactatctgttaaatgttatttctggatgggtctgtgaggatgtttctggaaaaggtcagcatttgaatcagtggactgagtaaagcaaatggcccctccaatgtgagtgacaccattcaatccaatccactgagtgcccgagtggcagatggttgaattagctctgcctggctgtttggactgtgacatcaatcttctcctgccctcagcgctcctggttattaagccttcagactcaggttggaatccacacccgtggctctccagctctcaggccttccaactataccattggctttccttggtttccagcttgcaaacagcagatggtggacttcgaggcctccataattgtacaagccaatcctttataacaaatctcttcatatctctgtgtttctctggagaaccctgactaaggcactttctccatgctgctctctgcttcacaacacaggctgctatggactccatccgtggggctcttgtgccctataacttctgcttgtatttgacaacaagatgcctaggaatgaggtagaggacagaggagactgacatcatggtgtttgtcccctgctctctccacaaagtggccagctggcactccaattctttctagatgtttgcctcatctttcaggcttaggctaggtggcatggctgctgcagacacttgccctgtgtcccagggtttctgtgtccctgcaccattgcacagcgccccgtatagaaactgccctgaactctcctgttgcaagtgtgcctgtgctgactgtggagacccagactgacatgctccccaacccgttggatgaggccagtataaccttgaaacccaaaccaggaaagcacaatatgagaaaaaacaatcacagcccagtttaactcatgaagatagatacaaaaattctgaagaaaacattagtaaacataccacgcacaaaaatctagatggattatggacgtaaatgggaaatgctaaactttaagaatttcagaaaaaatatttaaaagtagctttatgaccttgatttcctaaataagacataaaaaatgcaaaccacaagaaagaaaaatcaatacattctttccattaagattaagaatattttttcatcaacatgccataaataaaatgaaaagacaaccacaacccagaggatgacatttgcaagaaggataaataaatcctacaaatcaattgaagacaaccaaacagaaaaatgggcaaaagatttgaacttgaagacttaattacagatttcaacagactcttggccctcttccgcttttgctgctcattgcttcagtgggaaaagcatctgcttacagaaaaccagacagatcgcaggagaaggtggaagcaggagtgtcgcagcctgcagaatccacctgctttttctttgctttcaaaatggaacctgatgactatttaagagctggtaaacagatattgtgttgtggaaaacgtctgcagaaaggagaccaaaggctggatgaggacgatgacctccccacaagcccctccactctgggcatccttggcctcttgtgacacgctctcactttttaagccttgtgatttctcatgtttctgtgtctggaaagagaaaatgtaccctgggacctttggagcgatgccagcttggagccatctgtagcaccgccttgtttgctgactttctgtgcgcctgctgctggcctgctccccagaatcagaaggcatttccagccaagatcagccatgttcttctgctgctgccctgggggcgagggctcagggctgcagtgggagctgctgctggcagcatggactgtgctcccctacccctgccctgcagccacagttgggagattcctcaagcaggcacagactgctgaccattccttcctgggccatgtttggagggtgcccagcagcaggtgggtcgcaaatagatttgctttctgcctgggttatctccaggtcagcagccagcctagaacaggattatttaggggacaaagaagagcttgtcaaatagtgctacatgcaaaaaaaaaaaaaaaaaaaaaaaatagagtggagagaagaaaccaaccgagatcagccgtgttgtttacagaggattatttgtttccccagaatgatcagaaaatttcagatagcagatgtcggctgatgaagagagtgtcacagtgtgaccctttcccagcaccaatgccatatctactggtgaaggagtgatgaagaactacagccaggaagctccctgtctgcaggttcctcagcccacataagcagagcctgctgggataaaacacatcatcatgttcttgtttatttcctgcttctcctaggagctggactgataaagaaatcctgagcttggtcgtcaacagacagaaccaggaagttgtgcagctcatagggggcctctgtgggacacacaccatctcgcccacacagcacccagccacgggttgatccaacaggaatcccacacttgccatcatgcctggtccagcagtggcctgttaccaggttcagcttatgagacaggaggcccagtttgctggactcctgggaaacatactttttctttctttctttttttttttttttttcagacggggtcttactctgctgggcaggctggagtgcagtggcacaatcacagctcactgcattctagacctccagggctcaagcgatcctttcatctcagcctccagagttgctgagactacaggcatgtgctccccggctaatttttgtgttttttagtagagatggggtttcaccatgttggccaggcaggtcttgaactcctggcctcatgtgatctgcccaccttggcctccccaaagtgttgggattacaggtgtgagccacggcgcctggccaaattgcacatatttaaagtgtacaatttgatgaaatttgtcatacgtatgcacctgtggaattatcactacaattcatacaacagacatatctatcacctgaagttttctcatgcccttctgcaatccttctctcctatgctccttattccacagacatgagcagacctcatatttcctgttattccatggtctaaccagagctcatatttttcccttcttttattggcaagaacagggctcctatttgttatagccagcactcctaatttactcttgttccacggaaatactcaggcccctatttttccattgtttcatggcagtaaccagacaacaactaagccctctatttccctttgttctgtcgcccaggctggagtgcttggtgtgatctcagctcactgcagcctcgacctctcttgggctcaggtgatcctcccacctcagcctccagagtagctgggactacagatgtgggccaccatgtctggctaatttttgtattttctgtggaaacggggtttcaccatgttgcccaggctggtctggaactcctgggctgaagcaatcctcctagcctcagcctcccaggtgtcagccactatgctctgcccctattccatgctgtaaccaagctccctgtctccctttatacatgtaccttaccagaatcatatttttttcctgattccatgtccacagagtcagaaatcagcattttgctgacacaagctaaggaacgccagtgtgacctgttaggcgcctcacatctctttctgtggcatagtcagggtctatgttttccttttcttcaattaaaattgccagtgactcattttcctctttatggacacaaccaactcccatatttcttaagcagatttattgtttatgctttgagccccacatccatggggtttctaatatggcccacccaatgttatttttcctctctatgggcctcagcctgatgggggtatcccaggtgtctggggcatgctgagacggcacaggtctgtgtggcttcccggattactcggaatccttcattatctattctacagcaagtggccctcggcagctcaggctcagggaatttcaaatgtatcacctccaccggctggacaagtcctctcaagacaggctctggggccaagggaggatgttgtgactggtgctagcaacattgtcatgatggaaggtggcctggcttccgggacatgacaggccatgggtgaagtgtgggttcagagtcacagaagaatcacgaagaagacattcttatgcacctgacacctgacttgggagcaggttctttgcctacatccagttagtctctaccacaattcaagtggagtctttctccccattctcatattacaggtgaagaaacccagcttagggagatgaggtaactctcccagagtccccagcgaaggacttgagccaggacagttggatcctaagtctcctgcttcccctccctcagcacgctactcctcacagaacaacgctttatttagttttggacattttaacctttattttggaataatttcagacttacacaaaggctgcaaaaatagcataaagcattctcgtatacccttcattccacttccccaaatgttaacatattatacaatcacagtacaacggtgaaaactagaatatcaacattcacacaatactattaactaatctgcagattttattcacatttcatcaactattccactaatgtttttttctggtaggattccatttaaggtgtttttttttgtttgttttttgttttttttctgagacacagtctcgctctgtcacctaggctggagtgcagcggcaccctcccggctcacttcagcctccacctcctgggttcaagtgattctcctgcctcagcctcccaagtaactgggactacaggtacacaccaccacacccagctaattttgtatttttagtagagatggggtttcaccatgttggccaggctggtctcgaactcctgatctctggtgattcacccacctcagcctcccaaagtgctgggattacaggcgtgagccaccgcgcccagccagcaaatgtttttaaaatagggcattcatgggcttttgggggtaagtgacacctaatcttcaggggtctgcggataatttctaaatggggctcacagtttattcctccctcatagggaggctgcaattacctcacaaagctccactagggtcacaacaagatagcaaaagccagtgcagggcctgcaggtatagggggatcctgcaagcagaaatctgtggtgggcgggcggcaggtgagcaaggagaacgtgtctgtaaaggaagcacagggaacaggtggtggctttgtaagacagttggaacccaaggaaggtaagaataatgtaccactccttgctccatatgactgcttccttatatctcagttcagatattaccttctccgtaaggccgcctcccttcctgtaagtgatgcttctctatctacaaccccagctcttattgcagagcactgtaggggctgttctggggcttttcttccctgagacatgtgaaggcagggagaggggcttgcacgccttagcaggtgtttaaaaattttgcttgcctggatcaccaaagaactgaatgggtggtgtaaatgggtagaaaatgaactggctggaaactgagtgacaaggttcaggtctgaatctctgtttaaatgcaggcaggccatcccccaggaaagcctatgttggtgagggttatgatgggagaatgagtgaactgcagcctggcaccaccacaccctggaaggtgcagttgggaagaaagtttctgaggctgtagacatggggatcggatgctggagaaaccccctgctgctgctgattgccctggtcctgtcagccaagctgggtcacttccaaaggtgggagggcttccagcagaagctcatgagcaagaagaacatgaattcaacactcaacttcttcattcaatcctacaacaatgccagcaacgacacctacttatatcgagtccagaggctaattcgaagtcagatgcaggtttgtaccttgctctcccaagacatcagcaggccctgttcttgccagttcagacatgtgaggattctggggtagctcccaagagaaccaagtggtggtcctccgtgaggtcccaagggggaagcatcttcacttgtagcaggtacattgtagagttgttcagatcccagaatgtccttagccatgcttccaaaatgctttcctaaggactggcatgaactctaactccaatacacttagaggcaaaagtgttcactgaggattaaactctttttttttttttttttgagatggagtttcgctcttgttgcccacgctggagtgcaatggcatgatcttggctcactgcaacctcctcctcccaggttcaagtgattctcctgcctcagcctcccaagtagctgagattacaggtacgtaccaccacacctggctaaattttttgtatttttagtagaaaccggttttcaccatgttagccaagctggtctcgaactcctgacctcaggtgatctgcccacctcggcctcccaaagtgccggagttacaggcgtgagataccacgcccggccagctctttttccttgggaagaaatgcctttcattctgatatttgaccctgccggagtgacagcaaggataattttgctccctttaaagttctcatttggcaaaatacaaatattctctgtaggcctgtagcccccaatattttttcaatgtgtagggttgtaaaattcaaaactgggtgttctgtgttatacaaacttcaaattatacagagggtttattctggaagtggagaggatgtgagagatagggttcagccagatcacctcaccttctgttttacatataaaatttctctgaaatatatcaattgaaggataatagaagaaagaaaagttgttagggaaccccttttattggtacaacatttcctcaaggtcagataataaactatacagtccccttggtgtccatgaggaattggttccaggacccctcaggatgcccacatccatggattctgaagtcttttatgtaaaatggaatagtgtttccacataacctatgcacatcttcccacatatggtaaatcatttctagattaattataataagtggtacagtgtaaatgctatgtagataattattatactgtactgtttagggaataattacaagaaaaaatgttcagtatacaggcaaccatacatttttttttcctgaatattttgatgcacggttgtttgcatccacagatatggagctcgtaagtacagagggctgactgtagaagttggggcagcaacaatgctacgtcctagttcaattagctagatttgggaaaacacaactggctatgggaaagctctctcgccagagagtaaggcagctggaacagagagaaccggcaaggcgggagggcagcgtggggaggaccagtcagcataggtcaaatcctcatcccaatgcagactgtcccacaggctggctcagtgaggcacttctaccacaagatggcgatgttgcccatttggttcttggttcttccacaattggttaagaccccaaggaggcttgccttgtgaaatcaatccatcaccattaagttagctgttaaggaataatgatgagcatttgatgtcattcacattgataagcagacagagcaggcgtgcctcctggtagctgggtgatcttggcatgggcctctgggcacccccacacccatatgaccattgtgtctgtccttacacctcacagaggggacaagagcaggcgtggagggctgccaggtgcctctgggggcttcacgcccagctcctcccaactgaggctcctggtcaagtgacatccagactctccagacctcagtttcttcacctgcaaagtgcctcagaataggagggaagcacttagcacagtgccaacatctggtagcacttataaaaaatctttgctgttattatgactactcctgtcattatcgaacaaataagtctaataacgaataacactttgcacactggaatgtcagttacagtgatgacgggtggtttagttttttcttacattctgagcatgctgaaagtcagtgtgaccgtgcctggggcagccctgcaaatgcccatgcatggatggcccccacatgtttgggtgcggggaggctggtactgccctcaggtctaggctccctgctgccctgtcccagtgtttgctaagggtgtcttcctcccaggagcagtgtgggcactctctgcctcagtcaccaccccagagatgaccaagccctctcactgggcttgaccagtgacagggcaaggcaacagggagcttcccagagcttctcctgcaccggtgaagatccactaatccacatatctactcaggaatccagctcagaacccgacagggaaccgtaacccccaagctctctgttagtctcccttctgggcgtagggcctccctgcccacaagggcttttccaggctccaacccctgcaggcttcatggcctcacacttgatcacaagtgaaagagccatggggaaatccctggcatgcgttctccatggctcgtgtacccaccatgcctccttccttcatttctgtacacgctaggaggaaactggcattattctcctcatttcctagatgaggaaactgagattcagtaaaatttacagagtctgcagggggtaaagccagattttgtgttctgtcactctcctaacactgaatctgcttcaaagtaacactgcagacactttgctaaaagatgtaataacttataattatgaaaatatttaaaatttattttatgcattcagggaaatgcaagcttccatttagcccacataacaactccagaagcaggcacaattgtggtttgtagtttgtaagtgaaaaagctgaggatgctaagtaacttgctcaaggtcacagtcactaaatggaaaatgcatgccccaaatcaattcgattccaaaactgtttttaactgtattgctaagctgccttccactaggttggtcaggaaggatagtagagacagaggaaatggcagaagggactgggggggtggggacaagatgctggctctgttgcattttgaaggccacatctgccagcctgggagtggcctgtggtggccaggcaacccagcttgatgttgcctcttctgtcctgaggatggaacagaggcaggtgagaagctttctgtggctgctgcagcaaaaccaacctatgaccaggggctttggctgccattgccctccctccagccagaagtaaggagaagggagccatgcttttggtgggtaagctccgcgaacaagaactgtggccctgggagctttactctcagtcctagcttctccaggagagggtcagccactggatgcttggagtccacactaacagcacaactgattctcggcagctgacgacgggagtggagtatatagtcactgtgaagattggctggaccaaatgcaagaggaatgacacgagcaattcttcctgccccctgcaaagcaagaagctgagaaaggtgtgtagtggaagtcatcccaaagggacttgtgaagtgaatattttaaaaagcaacagctagaagttggcagttttgccacttgtgtggattggggccagctggggcccagccctggggctgtctggcacctcctgaggcacctgggtgaaggagggaggctttatatttgggctggtacagccctgcacccaggcctctggttgcctggacccttctccaacctggcctgctccccagaccctctgcgtgaaagcagtggttccctttccttggggtccttcttctgtcttctttctccctctccaggtctctaaggttgtccaatttcctccttgttcccttctatttttcctggtccatgagtggcaccccttgaaagctggcagatacaaggggctcccccatgcctggggaggtgcaggaggaggtaacgatgctattgctccttgctggcctgcctggcccacatgacagggtccggccaggccatagactccaggttcacctgctgtgggtcccaagtggctgggtagggggaagacagggtgacattcctgttccagactggcactcctttctgtttctacccttgactgtgggcagctcccctctctgcccatggggttcatgagcagccacagggagagacctggggaacaggtgcctgttgcttgcctttgaaaaatacttcccccaaagtctgttttctttcttcttctacagagtttaatttgcgagtctttgatatacaccatgccctggataaactatttccagctctggaacaattcctgtctggaggccgagcatgtgggcagaaacctcagatgagggctcatatgattgagttgtgcactggctgttattaaactgtaaaggatcatgtctccctcattggggtcttattacacatgcacacacacacatgcacacacagagtgtacacgtacacacacttgcacatacttaccttcacaacccacacacacaatgctcatactcacgacaccctcacactctcaccactcacatacatgcacattcactttaacagcctcacacactcatccacccgcccacccactcactcctacatgtcaagcacatgcacactcactcgcacacacattcagtggtcttcaggggttggtgcaatcttttctttcttttcctttctttctttcttttttttttttttttttgagacacagtcttgctctgttgcccaggctggagagaagtggcgcaatcactgaagcctccgctaaagtggagctcactgaagccttgacttccccgggctcaagtgattctttcaccttagcctcccaagtagctgagattacaggtgcacaccgctttgtccagctaattttttaaaacactttttttgtggagacaatatctccctttcttgcctaggctggtcatggactcctgggctcaagtaatcctcctgcctcagtctcccaaagtgttgggattataggcgtgagctaccgcacccacccagctgatgcaattagaacagaatgttcataatcattggggaaacctcatcattctttctacgccaccccacatctctatggcttttctgaatttagcatgtccctgagctctgaccctagtgtggggagccctatttcttcccagcacacacacaacactgtgactcacacacatttttgtgagtgtgtctgagattcccaataccaaattcacattgagtgactcactagaggactcacaggacttagcctagagtcattctcatggctgtgatatgacagcaatgggacacagggcaaaaccagcaaaggcaaaaggtgcatggcgctaggtcaggagaaaaccagccaggagcttccagagttctctctcggtgccgtcacacagagcacgctcaattcccccagaagtgagctgtggcagtatgtgtcacaaggaagctccttaagacccagcagccagggtttttaccggggactggtcatgaaggtagtctctgcctggcacgtgccaaaattccagactcccagaggatagcaggggttcaatgtcaacctcactgctgtacagagaatgtaaacacactgaggccctcttctcatgcaggaaaagttttctatcagtgtagggaactgttgaccctccaagttctcaaactccatccaaggccagccttgcaagcagcctttctttcttttttttttttcttttttttgagacgaagtctcgctctgtcgccaggctggagtgccgtggcacgatcttggctcactgcagtctccgcctcccaggttcaaccaattcttctgcctcagcctccctagtagctgggactacaggcgtgcactgccacgcccagctaatttttttgtatttttagtagagacagggtttcaccatgttggccaggatagtcttgatctcctgacctggtgatccacccgcctccgcctcccaaagtgctgggatgacaagcgtgagccactgcgcccagcctgcaagcagcctttctaaggacagcagttcaggcgggccgtgcgaactcatttctgcacactgagtcattgagcctcccatgttctgatggctgcttaaataagacctgtgttttctcctcttctctggctgacagtcgattagagaaggtgcatgttagaccagaaatggtctaatagccacagacaatggctgacagtgtgcctattgtaccacttgaccattcagcctcttcccaggcaccagcgccaccagctggtcataatggcaacttgagggagtattgctaaaggggaagaataaacatagagcaagaacctcaaacttgacagcaaggcctgagggagaagagaggatggaggaagagagttaaaggaggtggaattcctgcgcaaaaaaccccacaaaaacaacctccccacaaacgtcacaaaaacaaaaaggccagaaagcacccagtcctgcaaatctaagctaattgagggctgactgggtgaccagcactggcctgctgcccacattatcctatttgatcatcatgaccaccctacgaaatggcaactttttctccactttatagatgaagagcctccaaaggcagcctctgtccagattctaacatcctaacttaacacagcttgttggttgcatttttagaaatggagtcatacaatatatattcttttgtttctggcttcttgaattcaatacatccgtgtggtcgtgtgtagttatagttcactttctttattgtatagaattgctttgtgtaaatataccacaatttatctattgtactgataatgtacttttgggtcgttttcagcttctaagaacaatagctattaacaagcgtgagtgtgcctgtctaatgctggacacattacatgtacttcttttcttttctttttcttttttttttttttttgtgagacagagttccactcttgttgcccaggccgcagtgcagtggcacgatcttggctctgcctcccaggttcaagtgattctcctgcctcagcctcccaagtagctgggattacaggtgcctgccaccatgcccagctaaatgtttttgtatttttagtagagatggggtttcaccatgttggccaggctggtctcaaacacctgacctcaggcgatccacccgcctcggcctcccaaagtgctgggattacaggcatgagccaccgtgcctggccacatacatgtgtttctattggatatatgcctaagagttagttggtaataggatgtgcttatgtttagcctttagctattttttgctcaagacttttaaacattgtttgttttttacctaatttgtttttctaatgttacttacttatcgatttaaatcttgttcaacctctaagttcttactttttgaacatcttttatttatatggtctaattgtactatttctatcttttttttgctttccaactttagagtcatctcttattattattattgttattattattttatttcaatgggtttttgggaacaggtgctgtttggttacatagataacatcttctgtggtgatttctgagattttggcacacctctcacctgagcagtgcacactctacccaatgtgtatttctatctctttaaacacaatttcatattgacactctattctttttataatgttttaccaaactttatggcattactttgaattttttaaagtgaactctcccaccccacccgctcaccttgctttcataactagcaaacaggaatggtgggcctgagccagcattgagacaggagtgggcacccaggccctggctgagtacagggaggcagcacagcagagctctccggcgatggagcagtgctgtgtcttgagcatggtgctggttacacgaatgtacacgtgtgactaaatggcacacacacagtaccaatgttggcttcctaattgtgatatttttctgtgatgtgataagatgtaaccattaggggaaactagaggaaggacacagaggacttctctctactacctttgtaacttcctggaaatatatactaattttttaaaaaacttcaaagaaagcccccacaacgttggctgagaaatccaagagattaatgggcataaatgttccaccttctctttttaatctccccaaaaatagtaatgcctgccttggggacaccatagcaaaaaatgtcagaaaagtgttgactgttgactggtattaaattactaccactgccactgccagcattcttcctaatggttaatatttatttgaatgcctgcttcgtgttaggcactgtgttaagcaatttatatgcattatcatcatcaatctttacaactgcctcaaggagtaggtactgttattctcagttaaagatgaagacattgtaggttagcatcatcccaggcagttggcggagggaaaccccacctgggccccgctgaaacagggttctgggcattccagcacttcaacagggagagtaaaagccaaaaataaattatttgttctttcaaagccaatcccatcttggtgagaactggtgttgctgacgtgcatctcagctcacagttcacacatgcaggagctctcctgttggtgctctgcctatagtctctcaaatctcacactttctgtgcatgccagcttgacttccctgtgcccttttatttgtgcaccgtctctgccgcttactctgccctggagctgcctcaggccagaggtactagggaattcatgccccctaagagccaatactgatgggaactgaactgttggataaataccccaactccctctccccgcagggaaatgaatgctgtaatgccgtgtgtatgtgtgtgtgtgtatgtgtgtgtgtatatgtgtgtgtgtttgctatggtgtccctagacctcacctgttgtattaaacccaaggcttttgcttgagctcttgggaacaagatcttcctccctttcttactggatgtgaaggaggacacacctaacccattgagctgctggcagcctccctgcaaccacatggaggaggaagtggagtggggtaagcccggtgacatcatctgagaccttgaatcaggctgcggagttgggggatgcttcctcccgtggctgctgtgccttctgtggaaagaaagccccttgaacagaggactcctggcttctccctgtcctcaggacttcctctcctgctgggattaatctgactggtctgtttgggaagaatgaactgggcattgtcaccaggtctgcctccttcacggggggcacatatgtccctttgctcctctaggagaggaatttatttatagacagacctggtttggtccagtgttgctcgtgcaagggggcagaagtctaattctggagtttgcaattagaaagtgcacttgcttgcaaaaataaggcacatctctcaacctggttatcatatcagtagcaaaggccttgtctttcttagttctttggtgatttcttcttatttcacactttaggtaaggagagagggtgatcttcattgggcccctcagacgtgccatcacaggccatacttgcaaatgtctcttggctgttcagttgctttgagcttcttccctctccttattctgcttctcagtttctccatactattttaaaatctaaagaatcttaaaatcttgcctgatatgagaatgaaattgaagttctgctaccatgaaggcataggtgataaggtcaggaataatgtaggtcacctcatttggacccccaaactgccctggcccagcagactttcagattattactatgagctgaagaatttggataaaaagaaaaagaaaaaaagtggaatcacgatcttaagagaatatgttgacaaacatttattgcctatattaaggattattgcccattgcaggattctctcacatgcagtggccgcagttgtacactccaggacacctagtcactgctgcagcttttgttcaaaattttgtactgttcaaaccagggtacagcaaacactgagaagaagcagttgacttgctaaaacaaaaaacaaaggcaatattttaaaagacgccaggtgaaatttaaaaggagaaggaagaggatgtaagacacgaagatggagaaaaggctaccacctctccacccctacaatcctatttgaccacaaacagaaggacattttctggaatgatcccagcaatgttactatcaagcggctgaaatcaaaataaatatcaaacaagatatttagaaataaagtgtctgcgcagcccatattcaccatgggtactgctgattcttttttccctcttcatttttactcatttttttaaacttcacttcttcccttatttgtcctctcttggctccatttattcatccacccattcttccaaccatctatttatccctccattcatctacccatatgtccatccatccatttgtccatccatttatccttcagtccatcccccatccatccatttacccatctgtcgacccatcaacccattcatccatccttccattcatccctcatccatctccattcattcttccatttatccctccttccatccacccatccatctttacttcctgactttgcttcctctccctcagtgcatgcagccttgcttcatttcttcatccatctgtccattgcaccatctcccacagatgggccagtgccaggtgggatgaaggcctgttggagctggagctgccttcgggggtggtggcttcccagcagagcacacgcatgcaagtttgtgcccctcatccaccctcacccaccagtcaaatcatttctgaacttgtttcctcacctcctcctccccctggatgaacatggctggatgaaatgagagaggacaggagcccagcacttgcgcggccttgtcatgttgactctgaggtattcagtcagcgcacctgacaggtccctcccacaggctgcttaaatattaggaattgtctgcttccctcgccccagagtgtgcccctgcagctcggccacctcaactcctctctctggacatgttcagcctcctcacactccttccagcaacaaaggagcagcatctcggctgtctccacctttgctttccctctctgaggaaggaggtgttacccatgcattcttttcaagccagcttgagtaaattccaattaattcttcccaactcattctaaagccacagaaaaacctcactgaaaaggacttctgtctacgttaaagtgcttttacccaataccttgtgaagctccctttcctgggggacacagttcgtggtctctggcttttggcaggtggtccactgcatttccacattcaggtgatactccaggtggtcagtgacctgtgggcgccaggcgtgggggaggcacagcttgtccccttctcccctgtctgcggtttctgtgcctgggggctccgctaccccacgtccaagggcaaggagctggtcctaggcggattagcgggctcctctctcctctatttgactcatgattgtttttgtcattccaagagaattaaccagaaaccatcagaaacatgaactttccccctgggcaaatctatcccttgggtaatgcaagtgacgctagtgattctggataggggtctgtaaactttttccgtaaagggctacatagtaaacatcttacgttttattggccatgtggtctctgtaactactcagttcggcatgagtgtggcagcagcaagcagtggcagacaaagcacaggcatgctcatggctaggtcacaagaacacgacttacaaaagtgggcggcaggcagttttggcccttgggatgtaatgtgctgaggatccctggtcctgggttttgtttaagtgccttaatttcatcaccctagtgaatttatgcttctcttaaagtgctcacatcaagctaagcaaggttgaatttcccttgagtgggactattcctgacaccagtggccacccgatgtgggcgtatcaggcctggggagaggcgggaagtcatacactcacctgcctctggactttaaggactcggaagatcctgaagtggtacttgtcatcactttccttgttatactggtcggtgatccactgcaagctgtccttcgcatagttttctactgccatcacttcatggacgcttagaaaggttttcttccttgcttggtaggggagggccatcagagtcaatagaatggccaacaggagctgtagggcctgccagggctcagccatcatccttcagctgcagaggaacaggaagagtgttctctgtactcctcagggacaagtcgaatcacactgaccctacctgccctggcaggatttaagagcagctggtggtggacacccacagctctcctctcctcctcctcccccttcatcagcagctgaactcgaggggagagcagcaagagactgtgcaatggtttttgcataagttcatgccacacacacacaggataacacacacattttctcttttgaggggctgctccctcagcaacacacaggcttctgtggacccagcattgtcttggtgggagccaggcgagggcccctgggagtcctggaggatggtagctgctggagacacggggagattggatgccaggactggcgcattcataggtgagcagtggggggtgggcactgtggggaggggccgcctgcaccggaagccactctcccccagcctggttcctggagacgagttctggaaaatcccctcccttagaggacaaaggagcagaggcaccctacagaaaggtgtgaagggagggagagtcaactctgacaccgacgattccccagtaccgacaagtcctagagtggcctccgctggacttgcatgttttggaggaggaggcagtggcgaggaagcttcaggtgtgagacacagggagctttctggttggacattctggtctcctaaaggtcccatcctggggacctgatgggagtccccagacttggctgccagttagagaaggaagaagccactggtgggtggaggctggagcttgtgtcccacggcacacagaatgcaggcttagtgcggttatgttcgattcctagaaggcctgttatggtgtcttttgggaagatgcgatataaaaatgtgcagtgatggctcctgtgtgggaacccggggaggagccctgggcacacccaacgcctgtttcgaggcttcctcatgtgcctccaggggatgccaggaaccaggaagccagggcctctttcctgacacccctgctcagccttccctcacagacacacttgctgcatagccacattcacacccgaacacacggacacacaacacatacacatacctacacacacagtcacactcacactgaaacacagacacacaacacacagagacacatacctatccacactcacactgaaatatacagacacacacacctacatgtatacatccacattcacagtgaaaaacacagatgcacaacacacacacataccgccacacatgcacacatacacactgaaacacacacacaacacacagagacacacgcacctacatgtacacaaccacactcacactgaaacacacatactacacacacatctacacatacacaatgacactcacactgaaacatatagacacacaacacacacctacacgtacatgcccacactcacattgaaacacacagacacacaacacacagatacacacacctacattacacacccacactcacactgaaacacacagacacacaacatacacacacacctacatgtacacacccacactcacactgaaacacacacacaacacacatagacacacccccccacgcatacatacccacactcacgctaaaacacacagacacagtacacacacagacatacatacctgcacacacacacactcccaaaactcatggacctcagggttcactccttggagtacagtggagcgcacatcctccatgccctcttgatggagggtttggcatcaccacagagcgaacactgtggaagggctctgtctccacctcctgtctgtgcttccaggacggcctcaatttgtctggtggcacaaaggcaaagcagaaaaaggtgagaagctgggcatcagttgggcctagtgtgaggtctgcttggcctctgccctgagctccctgagcggctgtaagtgggatatcaatgctcttttcattgggttactcttacattataattaagagcctatgggcagagactgctcattttattttcctcagtaacagagctgcatttttgtttgagtatgggactgcctgcaataaagactgcatttcccagccttccttgcagtgggggtagtctcatgaccaagatctaagtgaaattgttgtttgagacatagaggaatttactctgtaaattgctgactcagttacaaagagtcatttttgccttatctgccattgggaatgaggacatgatggctggagctccagcagctctattggaacatgaagtaatctggagaacagaagccagctctgaggatgggagagaaaaagacgaaaggattgtggtgccttgtgcccttgccactttttggagtgccagccctatattgccatcccaactcttgtatagtaaagtttattttcttgtttatataaataagagtttattttcaactcttgtgtgcttaaaccaccatagttttggtctctaattctcatggctggccacatactactactaattgaaacagaatctgactcatagtaagtgcttaatatgtagtgggattattgtgcaattgtctgaacagtatttatgaaattttgttttttattgtctgatttaggttgttcatggaatagacatatttactacatgtctccggcagaattgctgtaacactaggaatagtatatgtaagcatctagcacgtggtggggcagggtggtggggctcacaaagaatccctcctgtcaatgtctgtggggtctgactgtggatcccctcccatgtgtgctttgcagctgtgcagaactggcaatgttcatctccgacctcagtgggcagcccatgggccttcacttgtgtcagtgcaaacatgccttgccagttccctcaggccccaggtagcaaggcaagagggcggcaccaaagaagccgggccaggaggcgcaggtggtcgatcttccacagggttgcactggcagcattacctcttggttgatctcgtcagtggcccgtgggttctcttcctgtcgcccacttgccctcctggccctgcatggggaggtgagcagtgtgaagaacaccacatcctccagccctcttgatcttgtcttttttcccctctgctttttcttcttgttattccctccccactcccctgcaggctggaatacaaactcttctccaagcccaaatcttgacctcttcctctatgttcataattctttacctcagcagatacaagaatcccctttgagaagctgatggaagctgtggcccactcccctgaaaacagagaatgtgccccttatggggaacaggcttcacttgcaagtgtcatcatggtgtggctttgtcctcacttcctactgttcctttgcatggactcagccatgctatttgtcctctgtgacttttcaagtgactcccaggcaatatacacagtctcaatccagttattgaaatgctagtttttggagatggtcaaaactttgaacgtgctttaaagttgcgcttctccctcctggaggcttgcatttggggaggagtgcttgcttctttctctttttccctatgcacaccacatctcctctgcctcttccatctcaccagccatggtttttagggcccctctgtgtcagaacgagcagagaaggaagatgtagaggactggaaaattcctacttggctgcagctgctgtgctcccaagccttggcagaattttaaaactggctgttctggggtcccttcctgcctctgcccagcctccatcgctagcagcccctcccctgcagctcccctggcagctgtgctcatttcctgtggctgctgtaactagttactaacaacagtggtttaaagcaacacccttttattatcttgcaattttggaggttaccagccctacaatcaaggtactggcagggtcgcattccctctggatggcctaagggagaacctatttttttcagctgccagcattgcttggcttctggccccttcctgcatcatcaaagccagcatggagtctcttcagtctctctactctctggcctctggttctccccagcatgtctccttctctgactctccatctccctcttctaaggacgtgattaattacatggggccccttcagataatctcaccatcctaagatccttaacttaatcacatctgcaaagtcacttttgcccacaaggtaacaagttcacaggttctggggttaggatgcggacatctcgggtggggtgttattctgcctgtcatggcagcacagaggctctcccttccggctgccggttgctcttgtctcggccaggactgctctggttcttttggctgaggtatgtggagccctgttgacatccctaccacctcagttccttctctgctctggaccatctcaacccagccgcttcttggctgcctggccagaaaagcaggaagtcagtcaccactagcttgggcgagggtcaggtagatcacctccctcagaacttcctctgttcccgactcctggacatttcattttctcaacatgggtgagcaattcaggtggcttctgtatccgctatgaaaaattttacgttcttctctggcacctgattttgaaacttgtcctaataaaaaattccatttaacattcagtaacatttacataaaatgttgcatatgactttagggaggttacaggccgctgaatccaatcccttggcatgggataatatgtatgtatgtatatatatgtgtgtatatatatatatataaatttttttaaaggctagtcaagtgaagcagtgggggtggagaaagaacaaaggaatctgtaactgtttgtgatcaataagttgtaaataccattgtacttgcaccagccttgatgctattttaagaacccctcttctacagtctcagttactaacaatttggtcacattcaatgctcccgtagaggtgactcccatatagttaacttcattccaagttccctttttgaagtgtgattttatattgctacctgtttgctgcaaattcctttgaaagtcccactgtaaactgaatctcctccagccaaagaaaggctcattgtcttgacttccttccatcgcctctctggggtaccctattttgtctcttgggaggcccagagtcagccaccaagtcccacaagtcctccagtcatgtctcagttccacactccatcccctatggcttcttctgggtaacatggatctatgggtccatggattaattgctaggagacatccatccacagatgcaatattgtagcatgtttatattccaaaaaaaaatctttctgactttccacatcctaccaagagttggttaagatgctaaaattaaaaatagaatggactgccacttccagctgtcagaaagacttcctctcaacctggtatagaacactcagactgcagtttgtatatatttgcccaaagttcctgcagccacaggcatggagttgctctgctggaagatgctatctggccaccaaactgtcatctcacatagatgaacatgctgaggaatgtgccagtttctaaaattttccatgcactcttaaactccagtggctttgtaagttttcagattgcaatcaatgaatgttcctgccctgctaaatcttcttcattattccccgtagctcaggtggatgtgtctccttgcatgctgattctcgcttgctgttgtttcctcagctttcatgtctcatgaaaactgttctcctggccaaattgaacgaatgcagctctctggactcagagaggattgaatgggcaattaatcaggagggtgccagtctcccaggagaaccagcaaatatcactgaattacggtgaggatgagaaaggcacatttatcagtactgttcccgggaaggaaggcccctgaaccattggaggtggacccagtttcctttgggactttggttaagatgggttttgttttgtgggtctggggccagaggagttggaattgctgggcctcagaggagaggccgagctcttagccagagactccttttcctcaccttccctagaccatttggcctcttctctccattaaagaggggccaacatttaagagatgtaggtttataggagtctaagatcatgagcttcctggggcagccaaattccctccttcaaagtctccagcatacgtgctgtagctctgtcttggtaggggattcccctctgctgagcactcttgtccttctcttccttttgttaacagctgctcatattcctggactctgctgaagaacaatctcctccaggaagcgccttctgattgcctggcccaccttctgcccaggctaacacggatgccactgctatctggccacacttctatcaaaacatgcaagctgttctccttccactgctcttcagctctgcctctggaacctcactttgaatcccttgggacaacaaagtcagactggctggactcacatctggctccaccattgaccagctgggtggctgtgggcaaattacttacattcaacgtgcctcagtcttctcacctgcaaaatgggtataaaatagttctcattcatgctaatgaaatgagataatccaggcaaagagcttataatggtttttaaaaaaatgttcaattattattgttgttgttattatcatttgttattttctgtatttctgacaagtagtgcagttcctgatgttgaatgaaccactgacaatgttcacacacacacacacacacatgcacgcacttgcccaaatgttaaactttggttctctcctctgactcattctttgtacccagtcatatggtcccattgggtcattcttcagaacacctgtcaaaaaccactggcatggcgcaggatttagttttattcacaactgtatctccagggcctgacacaaagtcattgctcaaaaacatgttggatgagtgaaggcatgaacacatggatgattgaatgaataaaatccttttccctgtagactgcatttccacagctgccttccagcccactcttcactgactccatccagactcctgtaatatcctgaccattcctgcactgttcactctggcctctccctgcacaatacagctagttttataccactgctgtgaggtcttcaactggttcccagtggtttagcaaataaggaacaaactcacaagacaactaagtgtttatagcatcacttctgtttatacttccccagcttgtacttctgccaacattagatgagaatgccttttccacaaaccctgctggcctccccaagtcctttataagcacctaaaatgcatttataccgttctgggaacaaatataatgggatcctgcttcacagctcagaaggcaaatggtgactgcctaacagctgagcttcccaaatgccctcaccaacaggaagtccggctccctctccacattcaaccagggttctcttgtaagcctcagtagaatccagagggtcatggggtggctgtcctggctgccagatgagcattcagaagtatcctttgtatttgttgatcccatctggaatttgtgttggtggaaggaatgccttggggattgaactatgtatttatttatctatttattttgcagttggctatctagttttacccaccccatttgttgaatagttatctttcactttttaattcataaattttgtaatcatggggatgtcaattgaggaaaatggcgagacaagtctcaatcatttttggagatttatttgccaaagttaaggacgcacctgggagacaggtgcctttctctgaagatgattttgggggttcaaaatttaaagggaaaagtgtgggatattgagaagcccgcagttttcacataaacaaaaggcacacaaaaaatgtcgggaatcctcattttacttaagataacacagacaaaatgggttagggaaacagtcagatacaccctgtgaaaggaaattaaattttggggccccaagctcatttagccaaagggaaaagtcaagctgggaactgggtcatgcaaacctgcctccaccttttggttcctaagtaagaagactacaagatgaaaagctactcgcctcccccatattctgcccacaaggaaattcctggtgagatgttaaaacttcaccgtggcaatgcaaattgatagtttgtctttaaaggtgcagtcaccctggccagccagacataaactttattgttgtcttattttcagaaattgccacagccaacccaaccttcagcaaccaccagtctgatcagtcagcaaccatcaacatcaaggcaagaccctccatcagcaaaaggattatgactcactgaaggcacagattgttagcatttttagcagtaaatcatttttaattaaggtatatatattgttttttatacatgattccacacttaatagactatgatatagcataaacacaacttttatatgcactgggaaaccccccaaaaaatgtgtgactcactttattgcaatattcactttattgtggtgctctaaaatgaaacccccaatgtctctgaggtatgcctatgtaagaaattgcaaaacatgcctatagtgattacaccattttgcattctgactggcagtgaatgagagaaccagtttttatcttcatcctcaccagcatttgttgttatcactattttttattttagctgtgtggtatctcatcatggttttaatcagcatttgtccaaggactgatgacatggagcctattcgctaataactaatgatctttttataagtgtatttactatgtgtttatctttggtaaagtattcatgtcttttgtccatttattaattggtgtgtttgtttttttactattgagtttttgaggttatttattttttctggttacaattttttaggtatgtgatttgaaaatatcctatttcagtctgtagcttgtcttttcatttaacagtgtctgtgttagagtaaaactttaaattttcatgaagttcaatttatcttcttttttcaaggggtacatgcacaggtttgttttgtaggtcaacttatgtcatgagggtttgttgtaaagattatttcattgcccaggtattaaatctagtacccattagttagttttgcctgatcctctttttcctcctaccctctgccttccaataggccccagtgtggtttgtttccctctatgtgttcatgtgttctcatcatttagctcccacttataagtgagaacatgtggtatttggttttctgtttctgcattagtttgctgagaataatggcctgcagtttcatccatgtccctgcaaaggatatgatcttattctttttttatggctgcatagtattgcatggtgtatgtgtactacattttctttagtctatcattgagagacatttagatggattccatgtctttgctattgtgactagtgctgcaatgcacatatgcatgcatgtgtctttataacagaacaagttatattcctttgggtatatacccagtaatgggattgctaggtcaaatggtatttctgtctttgagactttgaggaatcaccacactgtcttccacaatggttgaactaatttacatttccactaacagtgtataagccttctttttttcgccataaccttgccagcatctgttttttaaaaatttttaatagtagccattctgattggtgtgagatgatatctcattgtggttttaatttgcatttctctaatgataagtgatgttgaccttttttcaaatgcttgttggccgcatgtatgtcttcttttgaaaactgtctgttcatgtcctttgcccactttttaatggggttgtttgtttttttcttgtaaatttaagttccttatagatgctggctactagacctttgttagatgcatgcttgaaaaaattttctccattctgcagattgtctgctcactctgttgatagtttcttttgctgtgctgaagctctttagtttaattagatcccatttgtcaatttttgcttttgtcacaattgcttttggtgtcattgtcatgaaatctttgcccatgccagtgtcctaaatggtgttgtctaggttgtcttctgggtttttatagttttgagttttacatttaagtatttaattcatcttgagttaatttttgtacataatgtaagaaaggggtccagtttcaatcttctgcatatggctagccagttatcccagcatcatttattgagtaggaagtcctttccccattgcttgtttttgtcaggtttttcaaaagtcagatagttgtaggtgtgtggccttatttctgggtcctctattctgttccattggtgtgtgtgtatgtttttgtaccatgctgttttggttacagtagccctgtagtatagtttgaagtcaggtagcatgatacctccagctttgttctttttgcttgggattgccttggctatttggactcttcttttggttctatatgaatattaaaatagttttttttagttctgtgaagaatgtcaatggtagtttaataggaatagcattgaatctataaactgctttttaacaatattgatttcaacaacattgatttttcctatccatgagcatggaatgtttttccatttgtttgtgtcatctctgatttctttgagcagtgtcttgtagttctctttgtaaagatctttcacttccctagttatctgtattcctaggtattttattctttttgtggcaattgtgaatgggtgtacattcctgatttgcctcttggcttgacttttgttggtgtatagaaatgttggtaatttttgcacattgattttgtatgctgagacatcattttatgactccttaacataaaatgagagatatacaatttttttaaaaaaggatcatgcctttggtgtcatgtctgaaagttctaacttcatgccatgaatattttgctctaaaactgttatagttttatatttttatctatgattcaattttgagttaattcttgtataatgcatatatgataaaatttagtttcagattcatttctattgcatatggaagctcaatggttccaacaccatttattgaaaagattgttctttatacattgaattgcctctacaccaatgccaaatgtgagttggctaccagttggtctatttatggctattttgttctattctatgttttgactactgtattctgttcttacgtatgtgtccatcaccttataaataccaccatcctctagttctataggatttgaggtagactattgggattttcataacatgacacatataatcatacgtgtttctatatgtgaatagggaggtatatgcattcagttgggagatatttttattcattttgacaatctctatcttttaatttagatcacttatatttaatgtaatgattgatatgtttggattttaggtctatcatagagaggcccatcagtcttagtctaggttcctcaggcatctgaaccccaggaacagctttagccagcatatctgtcttctctagcatccatgttcccttccagcaagtttccctaagacactcacaaaattttttgtccgctgccaggaagaaaattcctattattttttcacatggtgaaataactgtgctgatgcttgatcctgtttctgatttatggatcaatggattgaagaaaaggcattttgtttgtttgtttctctccagatctacttttcagagctcacaaaatgatgaaacgttctaaggtcagatggctactctgctgtgttttgctgtgtttcagtggttctctgggcatgatggctctcaaatgtgatataagaattggacacccaaggagagatagtttgagactgtcgaactctgcaaaagtctagcaggcagagacacaccttccagagtggctaacattagcctctggtgctcttaggcaacacaaatgctccaaaaggaggcagaaaccctcaggccagctgagagaccagaggagaccaagcaggtcagcagtggggatgtcagggaggggatgctcttcccttctgctgcctcctctactgccagattgggcaccagaagacaatgccagaagacactttatagggagcaacttgccttcaaatcataggctttttcttttgtgattctgaattctcctgagcccctgaattttttattatggttaaaatgtatataacataaaatttgccattttaagcatttttaagtgtacagttcagtggtgttaagtacattcatccatgtgcaatcctcaccacaatccatctctagaattttttcatgttgtaaaattgaaactccatacccattaaataataacacctcattcttctctcccccagcccctggtaacccctagtctactttctgtctctgtgaatttgattagtctagatatctcatgtgagtggaatcatatagtgtttgtcttttgttactggcttatttcacttagtataacatcctcaaggttcacccatgttgtaacatgtaaccgttttttccttttttatggctgaataatattccattgtatggaaatgccacattttttttattcactcattcttccatggacacttgggctgcttccacctcccagctattgtggataatgctgctgtgaacacgagtgtgtggatatatgctcaattccaagcctctgattttgcacctttggtaatgaaggaatcccaagggagggttgcagaagctccagggcaggagccctgatcaggcagctctccgctctgcccatgagtctccaaaaggtcctctaggtatatgagcctgtccctaagggcctgaccaacttctcggttaataagaaaaactttgccaagactgcagatgattgcagaagcagcagctcaactcagcatgtccctaccagctttttgatgcttaaatccttcagcctgggggcccagcatggtctccattgtgaggactcagttgcagatgctactcactgccctttggagagacactgtggtaatagacacttgccttgatgtaggaaactgcctgacttggagcaagacctagagtggagggcaccaggggcagaaaggggatgaaagatcttgactttcaacgctgcttgggaaaatgcattttctctgcttcaattgaggggacaaaaattaaagttcagtgcctgataaggaagaagactatggtaaatatccaagggtttcaggtgaaaccatgagaggccacatcctaggagtaaaagtgaactggaaatagaccatttgcagaagcccagatttgaatctttgaactgaaagaaaataatgaacaatctagaattccatagtcagtaaagatactcctcaaaaatgaaagcaaaataaagacattttcagaacatcaaaaagaaaaaaaactcaaaaattttaaagatgaaaatgtttcagagtgtgttctttgttcacagtaaacaactataataaaaatagctaaaaataattttaataactctagctgtctgtaaatttaacaataaaaaaatcaaacaataaatttaaaaataattcatggattttgaattgaaagataataaccatatgacatatcaacatttctgagatgttgccataaaagggcttagagggaaatttatagtcttaaacccatgtgttagcagtattttggggacacccagaagagagaagatggagatttggctgaacccctaggatagggggtcccagagaagttaaattgtttagagaaaagtcagcttttggaaaaagctaaatgatacaccaacaagatccaataaaaaataaacactaaaatgagttctttggaggtaagggagaatgatcccaggtggaagcaaagtaatgttgaaggaatggtgcacagaagaagggtaaatataattgataaatccccatgaatattaaacgtataaaaccactgtaatattgttttacaggctatcaaatatgtagaatttaagtacatgacaacaataacatacaaggtagaagtggacaaaggggtaatagtgccctaaggtttcctcaccatctttgcagtggtatgttgggagcaggccccccaaaatctgtccataaactggccccaaaactggccataaacaaaatctctgcagcactgtaacatgttcataatggccctaatgcccgagctggaaggttgtgggtttacaggaattagggcaaggaacacctggcccacccagggtggaaaaccacttaaaggcattcttaagccacaaataatagcatgagtgatctgtttcttaagggtgtgttcctgctgcagttaactagcccaccctattcctttaattcggcccatccctttgtttcccataagggatactcttagttaatttaatgtctatagaaataatgctaatgactggtttgctgttaataaatatgtgggtaaatctctgtttgtggctctcagctctgaaggctgtgagacccctgatttcccgcttcacacctctatatttctgtgtgtgtgtctttaattcctctagcgccgcagggttagggtctccccgaccaagctggtctcagcaagtggcacccaatgtgggactcgaatccggatcgaagggttgccagagcaaccgttggaatggaaaactagctggaggacacccgagtactcttaaagcaatccccatggtgagtaagaaggggagctcagaagcatcagggtaacggtgggacagtgtggggtctggttcctttcaccttggaactttttcacactgataatgaggagaacaagagtatagtgaagtaacagaagaggttacagagcatgtttatttgccagctaaagcggcaaaggaaggaaagtttcatccctacccttctgcaccccctccttattattttgaagaaaatgaacccccagatctttcttttctggaggacactgggtgaaaagtagttgccccagtgactgtttgagcagtgcctcgagcaaccagtcttagttctattcaggcaggaattcagcaagctagacgagagggtgatttagaggcttggcagttccctgttagaatacaccccccagatcaacagggaaatattacagctacatttgagccttttctttttaaattactcaaagaaataaaacaagctataaatcagtatggaccaggttctccttttggaatgggactgttaaagaatgttactatttcaagtcagatgattcctactgactgggacactcttacttcagcttgtctaactcctgctcagttcttaaaatttaaaacttggtgggcatgggtgcagcacaccaacatggcacatgtatacatatgtaacaaacctgtatgttgtgcacatgtaccctagaacttaaagtataataaaaaaatacatatataaataaaataaaataaaataaaacttggtgggcagatgacgcttccattcaggctgctcacaatgcccaggccgaaactcaaattaatataactgcagaccaacttttggggattagcagctggtctggtttacatgcacaactggtcatgcaggaagatgccatagaacagcttaggggagtgtgcattggagagtgggaaaaaatcacttcaggtggagaacaatacccttcctttagtgctatgaaacagggacaagggaagcatatgttgattttatagctcggttacaggggtctcttaaaaagatgattgcagatttggcgctcaggatatagtgttgcagttattagcttttgacaatgctaatcccgattgccaggctgctctgcaacctatcagagggaaggcacatttagttgattatatcaaggcctgtgatggtatcagaggtaatctgcataaagctaccttgttggcacaggcaatggcaggactaagagtggataaaggaaatactccatttcctggagcttgttttaactgtgggaagcatggtcatgctaaaaaagaatgtagaaaaaatcagcgagtcaggttgccagataggggaaaaaagaaaactgttaagcctgtaatatgtccacaatgtaaaaaaggaaatcattgggctagtcagtgtcactctaagtttaataaagaagggaacttgatttcgggaaatgcatgaggggcccgtcctgggccctgttctaaactggggcattttcagcacaggccattccctcaaccctgtaaaatgtctgtcccctgccacagctggtagtgccacagtagatttatgctgcacaaaagctgtgagccttctgcctggggaactcctgcaaaaggtctcaacaggagtctgtggacccttgccagcagggacaataggattactttttggaaggtctagtgtaagtttaaaagggatacaaatacatacaggagtcattgattcagattacaatggggaaattcaaattgttatatctacttctgttccctggaaagcagacccaggaaagcacatagcacagctcctgattgtgccatatgtaggaatgggaaaaagtgaaattaaaccatcaagaggatttggaagcacaaacaaacaaggcaaagcagcttattgggtaaatcaaattactgataaacgtcctacctgtgaaataactattcaaggaaagaaatttaaaggtttggtagatacaggagtggacatttcaatcattgctctacagcactggccgtccatgtggccaattcaacctgctcaatttaacatagttggagttggtaaagctgctgaagtatatcaaagtagttatattttgcattgtgaggggcccaatggacaacctaggactattcaaccaattataacttctgtacctataaatttatggggaagagatttattacaacaatggggagcacaagttctaattccagaacaattatatagccctcaaagtcaatatacaatgcatgaaatagggtatatccctggtatgggactagaaaaaaatttgcaaggtttgaaagaactgcttcaagcagaaaaacaaagttcctgccaaagattaggaaataattttttatggtggccattgttaagcctccagaacctatacctttaaaatggttaacagataaaccaatttggatagaacaatggctgctaagtaaagagaaatgggaggctttagagaaattagttactgaacaattagaaaatgggcacatagctccaacattttccccttggaattctccagtgtttgtaattaagaaaaaatcaggtaaatggagaatgttaactgagttaagagccatcaattcagttatacaacctatgggagcattacagccaggattgccttcttctgctataattccaaaaaattggcctttaatagtcatagatttaaaagactgtttctttactatccctttagctgagcaagactgtgaacggtttgcatttacaattcctgcagtaaacaacctgcagcctgctaagcgttatcactggaaagtgttgccacagggcatgtcaaacagtccaacaatttgccagatgtatgtggggcaagcaattgaacctacttgtaaaaaattttcacagtgttacattattcactatatggatgatatactttgtgttgcccatactcgagaaatattactctaatgttatgattacttgcaaaattcgatttctcatgctggtttaattatagctcctgatgaaattcagactactactccttactcctacttggggaccttagtaaatggcactaccattgtgtcacagaaagtaaccatacatagggatcaactaaaaacattaaatgactttcaaaaattactaggggatattaattggatatgacctgctctaggcattcctacctatgccatgagtaatccgttttctatccttagaggagatcctagtcttactagccgtcagcaattaaaggaggctgaggtcaagttacagctgactgaaaagcaagtccataaggctcacatagaatagatccagagaagactctagatttgctaatttttttcatctcagcattcacctactgttgttattgtccaagaacaggacttggtagagtggctttttcttccacatactaattcatggactctaaatccttttttagatcaaatcgctactatgatagggattgggagaactcagattgttaaattacatggatatgatcctggaaaaattattgtccctctcacaaaggcacaaatacagtaagcttttataaatagtcttacctggcaaatccatttagctgactttgtgggtattctcgataatcattttcctaaaatgaagctgtttcagtttttgaaattaactgattggattctccctaaaataatgaaatttaaaccaattgaaggtgctgagaatgtttttacagatgggtctagtaatggtaaagcttcttattctggctcaaaaagtaaagtttttcagatgccctatacttaagctcaaaaagtggagcttgtagctgtaattgagttattgactgcttttgatatgcctattaatgtgatttctgattcttcatatgcggttcactccacacagttaattgaaaatgctcagttatgatttcatacagatgaacaacagatgactttatttacccaattgcaaacagcagttaggagtagaatgcaccctttttacatcactcacattagggctcatacacctcttccaggacctttgactgaagggaatcaaatggctgatcacctagttgctactgcaatatctaatgctagacattttcataattcaacccatgttaatgcctctggtctcaaacgcagatacagcattacctggaaagaagctaaagctattatccagcaatgcccaacttgccaaatggtacattcctcatcttttacaggaggagttaatcctcgaggactggaacctaactctatttggcaagtggatgtcacacatgttccctcgtttgagagactagcttatgtacatgtatgtgtggacaccttttctcactttgtctggactgcatgccaaacaggagagtcttctgcctgtgttaaaaatcaccttttgctggaatgcatgggcattccagcttctattaaaacagataatgccccaggctatactagccaaactctagctacatttttctctatgtggaatattaaacacattaccagtatcccataccattctcaaggacaagccatagtggaaaaaatgaatctctccctaaaacagcagctgcaaaagcagaaggggagagacagagaatatgggacactgcagatacaactgaatctagcattattgactttaaattttctgagcctgcccaaaggccagatgttatcagcagctgaacagcatctacagaaaccagctgcaaagacagaaatagaacaactgatttggtggagagatccaataacaaaaagttgggaaataggtaaaataataacttggggtagaggttatgcttgtatttctccaggccaaaatcaacagccaatttggatactatcaagacacctgaaaccttatcatgagccagatgctgaggaagagactccgggaggatcctgaggaccccccagttgcagccatgtcaagactgactctgtggaggactccaactgtcacaagcaacacctgtcgaacacagccacccatctggggacagatcaagaagctgtcacagatggtggaagaaaacctgaggaaagcgggacaaccagtcacaacgagtaattttatggtagctatgatagcggttatcaccactgccatgagtattccttcagtaagggctgacacagagaacaattatacttattgggtatatttatcaatcttggctggcaataattcctggatgcaatcactttatgacacagttacacatgctttctgatctcagtatttatcataataaaactgctcctataattgaggcataccgccctcaaaaacctatttgtaaacaggaatggacccagttagaaaaaatgaacatacttgtttaggaagattgcattgcagaacaggcagaggtactgaacaacgattcctatggaatcattattaattggtcccctaaggcgatgtttagcttaaattgcacctctcagtctgtgtgccacggtcacactatgttcagctgatctgaacaaaacagtcagatggtagatataataataagtacagcaagagttcctattatctggaaccatggcagtatagtggcacctcaacctcaaatgatatggcccactctaggagcttaacataaggatttaaaattaaaagaacaaatatttaaagcatcccaggcacacctgaccttaatgccaggagctggagtgctcaaaggagctgaaaatggataaaaacacttggaagctctgtgatttcaatgatgattgtgcttttaatctgtgttgtttgtctttgtatagtctgcagatgtggatcctgactcctgcgagaagtagctcaccatgacaaagctgcctttgcttttgtcgatttgcaaatcagagagtggtaaaggtactaatttatggtaactcagttaagtcaatgatactcattacaatcactatagttaccactaaaagaagaggtaaagaagagataacttggctgggtgcagtggctcactcctataatcccagcactttgggtggcctaggcagctggatcacttgaggccaggagttcaagaccagcctaatctacatagtgaaaccccattgctactaaaaatacaaaattagctggacagagtggctcacatctgtagtcccagctgctcgggaggctgaggcacgagaattgcttgaacccagaaggcttcagtgagctgagattgcaccactgcactccagcctgggtgacagagtgaaactccatctcaaaaaaaagaaaagacaaaaggggaggttaactaaaagccactgaggagaagaaattgaataaaacaagaaacagggacaaatgaaatgaatagaaaacaaatagcaatatggtagatttgaaaccaaacatatggtaatattagtcattagtaactaataatatgagtaatgtaaatggaacaactttccaaataagactcttagactgatttaaaaaactatttggtggttataaaggcacatattaattaagataccatattagaataaaagtatgaataaagatattcaagtaaataagaatcaaaacaatgctaaatgttttggtgtctctgacatcagacttcagagcaagaggcattactcagcataaactggtacattatataatgataaaatggtcagccaccaagaaagtgtaacaattctacttgtataagccctggacgacatagtctgaaaataaatcaagcaaaaattgtcagaaagaaatagacaaattcacaatcataatcatcatgagaaattttaacatacccctcagtaactggcagaaaaggcgaccaaaacctaaaccaaaaccaaaccaaaccaaactcaataaaacaagacaaagtagaaagagtaaatatggccaggcacagtggcttatgcctgtaatcccagcactttgggaggctgaggcgggtggattacctgaggccaggagtttgagaccagcctggccaacatggtgaaaccctgtctctactataaatccaaaagcgtggtggtacatgtctgtaattccagctgcctgggaggctgaagcatgagaattgcttaaacccaggaggcagaggttgcagtgagctgagatcgtgctactgtactctagcctaggtgacagagtgagactctgcctcaggaaaaaaaaaaaaaaaagaaataaagaaaaaagggtaaatatatagaaaatttcaacagaatggacttactgatgtatataaatatctaactctacatctataaaatgcagaatacgtattcttttcaactgcatatattaatagaatattggttattctagacaaataactcaaaaatttcaaagaagggagataatgaaatggtgttctctgactgactatagtggacttgaattagaagtcgatgagagaaaagataactagaaaatcaactacatttggaaattaaacaatacagctataatagcccacagattaaaaaaaatgtcatagtggaaattacaactggttttgaaatgaaggaaaactaataatcagcctgggaggatgaagccagttgcaccttctggtggaggaaggtctggcagcagggaaaatggactcttatagacatctcccttgcacccttcagagccccactggccacacactttgtgctctcctgggcccagctggcaatgtgggctccagccccgtcatgggcaggcttagcaactgcttctgctcttcaggaactggctcaccagaggtctcagagatttctttttccctggtgagccttacatgcactatgtgagggcaagccaggtgggctcgaggtctccaccgggtcttctcagggctgggctgcagctggaggaggcttccctgaaaaggtaggcagcaggcatgttgcatgcatgcctgcaggtccaaagttatgtgacctcctgctctgccttgtttggagataacggagggactctgcggggttgtggagagaggcactggacaaggcactgctcaaagggaggtgctcaacagctcagggcccctggtggacagggctgtgtgggacccagagctgagaagggagtcaccagcagcagctgccaccactcctccacctgagtgtccctggcccccagtgggtacgctgaggatagccatgtggtagaaggtgcccctgctcatggcacttattgtgctgagcacccgcatctggatcattcaaaaagaattcgtagacatcagtattttgtggcatcaatggagtttgctgtggctcagttcaatgaggacaatatggaagagtacacgcacaggttgctggaggtccagcgagcccagcagaaggtgagtggcagtcattttgtccactcccagaactctcttcaccgactgaatagctcaaagcccgtggtgatggcagcagggggtgacgtgggagggggtcccatgtctgcaccacatttctgaagattgggctcaggggcccttcctcctgcggtgggcacacagccttcctgatctttgcccatttccttggccatctgccccttccttgggttgcatccccatccctggaccctgggaggctgcaggagccctgggcacaggggggttatgctgctgcccagccacagtgcccggggtgggggcttcatgccagcctaaaaggggagaatgtaaggaggggcagggcatatgtgagtgttcttggtgtgtatgggagtatgagtatgtgagtgtgttattgatatatgtaaaaacatgagtgtgctgttggtgtgaatcaaggaatgactgtgagtgtgttggtgtgttggggcatcagtgtgtgagtgtgttgagggttgggcatgagtgtatgttggtgtgtgtcaggcatgagtatgaatgtgttggtttgtgtcaggcatgagtgtgagtgtgttggtgtgtgtcagggcatgagtatgtgagtgtgttgggcatgagtgtatgttgttggtgtatgttgggcatgagtgcatgtttttggcatgtgttgggcatgtgtgtgtgagtgtgtgttgggcatgagtgtgagtgcgttatgtgtatagggtcacgagtgtgagtgtgttggtgtgtgttgggcttgagtgtgagtgtggtgtgtgtgttgggtatgagtgtgagtgtgttggtgtgtgttgcgcgtgagtgtatgttggtgtatgttgggcatgagtgcatgtttctggcatgtgttgggcatgcatgtgtgagtgtgtgttaggtatgagtgtgagtgtgttgtgtgtataggggcatgagtgtgagtgtgttgtgtgtgttggtcatgaatgtgagtgtgttgtgtgtataggggcatgagtgtggttgttagtttgttccagggcatagttgggtatcatctcaaccccagcatggattgctgagcccttgactgggtcaagtttctcgacaatttctaggctgtccagtgagacctgtgccccagcctgtccagacttctggtctggattcattttctctctacatttgggtgcttcctgagtttcatggacttctacgtaaagaaatgaaaataacttttaatcacttcttatagaagcctaagaaacatgcacaacagcatggtgcagctctgcattcacctcgatgatcactggcaaggtagatggttacgagcaattagcactcacatgaagcagaacagtgccatcccccagagccccctctgtgatcccatctagattctaacctgcaaggagtcctgctgacctagtttttaatcccaggcattagtctcgcccatttctcactctgtgtaaaaggaaccacccagtgtgagccctctgtgtgtggctgaggctcaggtgtaaggcagaggcagtgtattgttaggtgtggctgcggcatgtgcaggctcactgctgcgcaggatttgattgtgtgagtgtgtcacaccctatgtttatcactctgtcaatttgtctgtcaggtattagtcattgggaagattccagtgtgtatctgaagcacacttagtggactgtcttctactgacctgcagagagattgtacatggccctgtctaggcctatttatatgacatgcacatggcagccttttatccactttcctatttgtttctctgccttttaaaaaaattcatgaaaagaaaacacttagcaactgtttgtataattcttcttgacagacgtggacaatgatttattattattattattatactttaagttttagggtacatgtgcacaatgtgcaggttagttacatatgtatacatgtgccatgctggtgcactgcacccactaactcgtcatctagcattaggtatatctcccaatgctatccctcccctctccccccaccccacaacaggccccagagtgtgatgttccccttcctgtgtccatgtgttctcattgttcaattcccacctgtgagtgagaatatgcggtgtttggttttttgtttttgcgatagtttattgagaatgatgatttccaatttcatccatgtccctacaaaggacatgaactcatcatttttatggctgcatagtattccatggtgtatatgtgccacattttcttaatccagtctatcattgttggacattcgggttggttccaagtctttgctattgtgaataatgccgcaataaacatacgtgtgcatgtgtctttatagcagcatgatttatagacctttgggtatataaccggtaatgggatggctgggtcaaatggtatttctagttctagatccctgaggaatcaccacactgacttccacaatggttgaactagtttacagtcccaccaacagtgtaaaagtgttcctatttctccacatcctctccagcacctgttgtttcctgactttttaatgattgccattctaactggtgtgagatgatatctcattgtggttttgatttgcatttctctgatggccagtgatggtgagcattttttcatgtgttttttggctgcataaatgtcttcttttgagaagtgtctgttcatgtccttcgcccactttttgatggggttgtttgttttttccttgtaaatttgtttgagttcagacaatgatatttttaacagatttggagatgggcctcacaatttgtaaaaaatatgatgaagacattgacaattgcccattgcaagaaggctcagcagagaaaaaggtttgagaataaaatcaaccccaaagcatcatgaatctctcgggaatggatagtaatatcaaggtgggcctttgggaggaggcttagaaaggtcatcagaggtgatcctggggcagaatgagggtccctgagccctctcccacctggtgtcagggctccctcagtgaaggcagaaggctggcatgtaagcagacaaagcctggcctcagtgccagggagatccctctgcctacagcatggctgactggacatagcaggcacctgcagattctacatggcctttgtccccagaccaagccctcactttgctccccaggccagtaccttcctgagaccctcgagatccaggtagatgatgttctccatgcagtcctcactcttattttgttgttggggattgcaggactgtctagtttctccggtcactcaacctgtccctctagttcctgtgtggtaaggatgtgtcctagtcagtctgagttctgacaccatcctcccatgacccatacatgacccatgtgagctcagaggttgaggatgctctgaatcagagttacaggagcagcagggctggtctcgcccttccacctgcaggcttgctgtcaactgctgtgctcagttggtgggtgcccagagggaccatcccttgggaagttcattctctcccctagaacacacagggtgggagccgttcatccagcatcatgtgtgctagggagattgtgagtggacacgatgcttcaggggtcaggtgatggcccaatcaggcatgctttcaggaatccccaggctcaggtgggagcattcagccacctgtgccccttgtcctggtggaggcttgggcatttcaagccctgttcctggatgactgtttttgtttttcattttttgtagtttttaatacatcttgaccccctactacatgctaaatgctctcagtgcattacatttttctaatttatatgttatacttattttttttcaggtatactgcacatttgtcatggatgcccgaccttggttttcccagttcaacctcctaaacatcacctgtaatgtggaaacaggtggtggcagagcccctgattttttgcagcagaagtcctctcttcctctagagtatgaaagtttgtagttctaggcctatgctgcactagcagaattaaagacatcttagctccttctgggtctgtgaacagttttgcactctttcctattatttatttgccatggatgtttctggcagtgataagcaagggagaattcattatcatcgttaccttggctgcaggtgtagactgttgaataaaccaaactccccagttgatttgaggcagttcatgtaggagccccccaccagttggttggtgtactcatccatccacccatcgatccatccatccatccatccatccatccatccatccatccatccatccatccatccatctgttccttcattcatgcactgattcattcattcatccttccatttctctatgccatcatccatccactctaaaggaatgcagacaattttgttaaccacacatgacccttctgtttccatctcaggaacaggctcacagagggtggctcttctgcagaagggccaggcgcaggcctagggatcagagaaggtcactgaagctgacaggaggctctgccctctgtggacaccgagggctgcatgaatcacaatgatgtcttctccagagctcagatgtcttctccagagctcagaagatggcagttccagtctgcatgcccacacctgctcctgatgcctgtgttacctatctgggacccagccagggcttcatagctgccagcatcactcactgcccctgggagaagcactgtggtgacagacacccatcctgacaagcagtcctctctgctggggtcttggtgggggatcagccttggaggggcagagagatgaggggatggtgtggtggggggacatgcattgggcaaagagacagtgcaacagtttctggaggagtcttcccgaacagaagggctagggagtctttactcctccatccttggtttggggggtgatttgaatatttcttggtaagaagtctgcctttttcctggatagctcattcccatgaatttgccatagggcttatgggacagaattttcagaaacagctttgggtagctccatctgtcatggcaaaaagatgtggcagctttggtccttcggccaacttctgtgcaggatttgtgtgcaacatccctccataatttgatagggcatatttatattaccaaggggatgtctgcatggttagcaaaaccaatcaattgctggcccttggctttgagagcactcaggctgggaggggtggagcccttgtttatggaccccatgcctactgttccggacaagcacagccacaccctccctgagctctggtcagcattgcttgctgatggaagcacctttacctttaattccaagttcacaaggaaggcctggcatcctgctctttttcacaataagccagttgttttctaccttgatccacacaaaatcccactggtttcattttatatttctcttagggaccaagcattacccctatctgtattgcaacagaaaatttgggcctaaatcataaatacttggagtcctcaggtgttcggtgcttggggctatggctgtgaagtggttctttaaggtactccaatattttagaaattgtgtttactgcagttgggtattttgtccatggcctgtgttctttagttccggctctcatagaaattgaaaacatagccctattgcggatttcactgttgatggtgcccagtggccatgagctatgcaagcagctttggtagggttagtaaattttgtgcctgccacttttgttagtaatatgatgacctcaaaccagtagagctttgaataatgtgtcaatatccaagatcagccagaatccaggagtccatcttgtttcctggagaaacctctctggatttgggtcagtcattaagtggcctgaataagtaggaagtaaacatattgaaagttatagtacacaaaattgacatatatttctaaattctagatctatgtcaaaccccgaatattttctacatcttatcgagtgacctgttttgaaggagcagggctctttggaatgcatttgctgagacccctcctaaaattaagacttaattaaaatctcagcattggagtgagggaggctgaagagacacagaactacatccctacacacccaacactgtaaaatatgtgtcaccgaaatcatctcctttaaccctcaccacagccccctccccatcttcatattagggcattgagctacttttgtggttaattactgggattttctgaaattgacctcagggccaaacgattccactacccatatcaccaactgcccttctaactcttgagtttccaaccccacagatccacaggcattcagtaaagaacaaaccaaaggcttaggaacacttgcaactgccacttatctcatttgtctgatgtttcccaaatactatttttttttcaaaagaaaatcacccactacaaaagctgctattgtttatttcctttctcctgtcagcccaggaatgcaatcagcagatcaaagtaaccaatctgtctgtcatgaaaaccccttgtctggtctccagccataccatactcatcttttgccccacttgctctctgagctccacagaccctgaatggcctcctcccattcctcttccagcctcctggttgcaccccgcttgaagagttctgctgctttttaaatgatgatacctattatctctgcaatggtctatattttacacagacatgtcccctgcttacatcctgtgcgtggcagacagaaaaatctaaaattccatctaaatcatacataacctcaaattagttttatattttaaaaatacagtctgtaattgattggagatgtgaaaaaaacctggcccttcacaacagattttgagaaacacaggactttctattggccatgaagtttatcttcacactgattttctgttctacatattaattcagacatggccaatgtcttcatctatactgtcatttgtctattgacttcttatgtcttccgtgggtcagaaatccttaattttataatttttaatgtgggatgtggcattttatactaaacatttttagagtactcttcaagtcttttcctctctgcttattttttggcttcttgatctatcaatttttggctttaggactatcaaataaaacgttggtcacttatcttttttttctgcagttctcttattttttgctagatatgtgttagactgcaatgatggtatataaatgttttgatgactgtattttcttgtcctattttttcctttgtttatttttgttcctatattagttatctatgctatgtaacaaatatccacaaacttagaaggttaaaacatctatttattatctgagtttctcaatttgtgtgagtcagacttatatgggtcctgtaatcagggtcttataatgctgaaatcaagttgtcagtcaagactggggactcatctgaggcttggggtcctcctccaagctcatatgcgtttattttaggactctcaattctattccattgatctctatatatatccttatgttggtactacagctttttgaagactgtagctttatagtaagttttgagattgggaagtataagtctcccaactttgttatttttcaagattgtttttcatagcctaggtttcctgcatttacatgggtgaatgggtccatggagttccccactctgacattccaaaagtataactcttttctagattctcctttaaagactcactggttaggtaaggtccatgcagggaaatatgcctttatagtatctcagcgcgatggattggagactttaattatgtctacaaaatagtgtcacctttgccatataacctaacctaatcccagcaatgatatttcattgtatttctatgtcctacccacaatcaaggggaggagattatacagagtgtgtatccctgaggggatatcttgttgttgttgttttaagatttctgtctaccacagtttcttattactttattttttgcattaagttctattttgtaatatattaagattgaaagtctatttttttgcttcagattttcctaaacattttcccaaccttttttaaaaaaatattttgggcatcttttcattttgagagtcttttatagacactatgctgtgggtctttttcaaaattccaatctgtaagtctcaatattttatttactgaggtatttttattaccattatgctagatatcttctctgttattttcaaacctttctgtttactgtattttctcattttgtgtttgtacactctcctagtgatgtgcctttggacggataagctgaagtttcttctgcttattcaactctgcttttgttcctgtggttactgctcacttagcttcagggccattttcatgctcatatcccctgtggcctccagttcctgtcaagatggtgaactagcacgggctgctggcttctttctgaaatcaatgctagagagactatagaaatgagaaggaaacttaaattctagtgaccatcaaagaataacaaaacaaaactacgtgagactcctgagtgactagcggctacaggttggctcttgttttgaagcaatttttcactgtagaaactggcagcaaattctaagacttcaggtaccagggccccagggaaagaacaggacagtgcaagatttctttcagtaacaggagttgatgacaaccagtggggtcaaaagtctactttcagggagttacatggcccatcccaaatctcctggtatggtggtatgaagggttgagactatttgaatgttgaggaggggtaaatgtattttgcatgtagagcttttaggtgtgattgaggatcttggaatggagagattatcctggattatctgggcaggcccaatgtaacacacaggtccttataagagagaagcaggagggtcagaatcagggtcagagatagagatgtgatggtagaagcagcagagagtgagagagggagagcaagtgagagacgtttgaagatactccacacctggctttgaatatagaggaagggactgtgtttgtcaaggttctccagagaaacagaagcaatagcatatttatatatttattgcaggcccttgctcacacaattacagaggctgagaagttccatgaccaaccacctgcaagctggtgaagcagaaacgctggtggtgtaattcagactgagtccgaaaaccttctttctggaatcattgctagagacacgaccgaagttgttggtggtgtctgagcctgaaggcctaagaaccaagagctctgatgtttgacgacaagagaagatgatgtcccagcccaaacagggagaatgtgtttgcctttccttcacctttttggtttattctggcccttaatggattgaatgatgcccatccacactggtgagggcagatctttttttgctctgtcacctattcaaatgttaatgtcttgcagaaatgtccttacagacataccctcacagaaataatgttttaccagctacctggacattcctcagcccagtcaaattggcacataatattaaccatcagagaccatgagctgagaaatttagtcagcctctagaaactggagggggaaggaaatgcactttcctttagagcttccaaaaaaaatacagcattgcccataccttgattttagcccagtgaaagccagtttggacttctgacctgcagaactgtgagatcacacatttgtgctttttgaagccaccagatttgtggtagtttgttacagcagccacagaaaatgaatgcaggtagattccaattttggaagactgtcaaaattgctttattaaaagcattttttaaagttattctttttttaaattttttaaacttcattttattttggggggtacgtgtgaaagtttgttacataggtaaacttgtgttatgggggtttgttgtacagattatttaatcacccagacattaagcccagtgcccaatagttatcttttctggttctttccttcctcccaccctctatcctcaagtaggccccagtgtctgttgttcccttctttgtcttcataagttcttatcatttagctctcacttgtaagtgggaacatgcagtatttggttttctgtttctatgttagtttgctaagaataatagccttcagttccaaccatgttcccacaaaagacatgatcttgttttgtattttttatggctgcatagtattccatggtgtatatgtaccacattttctttatctaatctgtcattgatgggcatttaggttgagaccatgtttttaccattgtgaatagtgctgcaatgaacatttgcatgcatgtgtctttatgatagaattatttatattactttgagtatatacccagtaatgggatagctgggtcaaatggtagttctgcttttagttccttgaggaatagtcatatgctttccaccatggttgaactaatttacactcccaccaacactgtataagtgttccattttgtccacaacctcaccagcatcggttatttcttgactttttagtaatagccattctaactggtgtgagattgtatctcattgtagttttgatttgcatttctctaatgattagtgatattgacctttttttcatatgcttgctggccacatgtatgtcttcttttgaacagtgtctgttcatgtcctttgccaacttttttaatggggtcatttgtttttctcttgtaaatttaaacaaagttctttatagattctggatattagacctttgtcagatgcatagtttgcacatattttctcccattctgtaggttgtctgtttactctgttgatagtttctttttactgtgcagaagcttttaagtttaaacagtacgatttgtcaatttctggcttgttgcaattgcttttggcatcttcatcatgaaatctttgccaaagcctatgtccagatggtattttctaggttatcttccagggtttttatagttgtaagttttacatttaagtccttaatccaccttgaattcatttgtgtaaatggtggaaggaaggagtacagcttcaattttctgcatatggctagccagttatcgtagcaccatttattgaataggaagttcttcctccattgcttgtttttgtcagctttatcaaagatcagatggtggtaggtgtatggctttatttctgggctctctattctgctgcattggtctatgtgtctgtttttgtaccagtaacatgctgttttagttactgtagccttgtaatatgctttgaagtcaggttgattcttccaggtttgttcttcccatttagcactgccttgactatttgagctgaattttggcttcatgtaagttttaaaattgattttctaattctgtgaagaatggcattggtaatttgataggaatagccctgaatctgtaaagtgctttgggcagtatggccattttaacaatattaattcttcctatccatgagcatagaatatttttccatatggttgtgtcatctctgatttctttgagcagtgttttgtaattctcactgtagagatctttcacctgtctggttagctatattcctaggtattttattctttttgtggcaattgtgaatgggattgcctttctgatttggctcttgatttggctattgttggtgtataggaatgccagcgatttttgtaagttgattttgtgtcttgaaactttgctgaagttgtttatcagctaaaggagcttttgggccaaggctatggggttttctgccttttgcaactgcatgtttaaaccttgaggacattatgctaagtgaaataaatcagatgcagaaagacaagtactgcatgatctccttcatatgtggactctaataaaaagtcaaactcatagaaagagaggagaatggtgattaccaagggcttgggggtgaggagagagggagatattggtcaactggtacaaacattcaactgtaagaggaatgagttctggagacctcatgtgcagcatggtgactgcagttaataataatgtattgtatacttgaagttcgctaagggagtagatcacagctgttctcaccattaaaaaaaaggtaactatatgaggggatgaatatgctaatttgcttgattgtgataatcattttgctatctatctgtctaagcatcacacgtgcaccctctatataactttttatttgttaattatgcctcaataaagctggaaacaaacaaaaagccctgcaactacttcccccaaaagaccatagaaatctcaaaatggaagaaaaataaaaagatggaaatatttgaagaaattatggagatatattttctaaaattaaaggaaaacaaaagacctcaagtataaaggtttggtatagataagctgtgctacgtaagaaacagcctcataattgatagcatgcagcagtgaggatttactcctgcttgaaaagtgtgcaaagtaactggagcagctctctgagtatgttcagagaaagcccaaatcaaaaatttctgagtaatatcaacatgatgatggtgtgtgtgtgcacgtgtgtgtgtgcatgtgagtgtggatgcttgtgaaggccaaaggagcataaaagtgttaaagatatacgatttggatcttttacctagttaacaaccaccaccacatacttctccaaagtctaaaacctagaaatactgctttgattcagtgaatgtgtgtgtagcagtcagctgttggcccagaagtgctgcataacaaaccacccctatcctgtagctaactacagtaaggcttcattttcagggacataggtctacaggctgacttctccttggcttgtccaggaggcttggctttgcttcagggtgtcacagctggcctcaccaaggggaagtctgctctacatgcctcctggggcccagatcaggtgctcctagactcagtgagtctctatgaaaacatggttaaccctgaccaataatacaaatagtacaaatcaaataaacggaacataatcatctattccatgaagaaaggctaggctgaaggcaaagatatgaagaagcagggattgtcacaggtcaatacttctctaatcaaactgggatctgagtatcagcagaatttggatcacatggggagctagttagaaatgcagaatctaggccttgcctcagacccacaaactcagcacctacattttaacgagagtcccaggtggttcatgtgcacattaatatcaggaagtgcagatccactacactgattttcaaacttggctgcagattggaacccctggggaactttaaaaacagctggcttcctggaccctgttccagagattctgattttatcagttaggtatgccctggtgttttaaatctccgtcagtacttttaacatgcagcaggatttgaaaatcatgaatatataattagtaagtgacgaacattttggcaataaataataaatttaaatttgcgtaaagctttgcatcaattttacatctagtcttttattttacaaaaacacttgtgtaacatcatgaagatattggaaagggattgttcactgcaatactgtttgtaacagctgaaaatgagaaactgaagaatctagtcatagggagaaagtttaaatacagcataatgcatttgtagtctgcaatgctttgccacctgcctgacagattcctgccccatatgtgttttctgtacgttgcccttgctcatagaacccattgatctttgcagcctaggaagaatgctcacctctctgcctcaccaggaactttctggacactgatttgggattttcacagaaaagcagaagctttgagagcttaacaggtgcgtgcccccctcctcccactaagggccaggcctgggcatcagagtgggccacgtgacccttaccctggcaggacagggcagggggttactgttggcccaagccaagggagttcagaggccaggcattcaggaagccagagtcattggcacaggtgggcagaagatgccagaggggccctgtattagtcagggttcttttaaagggacagaactaataggatatatatggttgtgtatatatataaagttaatacttaataaactcccctttatatatatataaaatatatatataaattatatatatattaattatatatataatatatatataaattatatatatattaattatatatataatatatatataaattatatatatattaattatatataatatatatataaattatatatatattaattatatataatatatatataaattatatatatattaattatatatataatatatatataaattatatatatattaattatatatatataaaatatatataatttatatatataaaatatatataatttatatatataaattatatataaaatatatataatttatatatataaattatatataaaatatatataatttatatataaaaattatatataaattatatatataaaatatatatataaattgtatatatataaaatatacatataaattatatatatataaaatatacataaattatatatataaataatatgtatataaaagggagtttattaagtattaacttacatgatcacaagggcccacaacaggctgtctgccaaactgaggagcaaggggagccagtctgagagtcccaaaactgaagaacttggagtctgatgttcgagggcaggaggcatctagcatgggagacagatgtagactaggaggctaggaccatctctccttttcacgtttttctgcctgctttatattcgctggcagctgattagattgtgcccaccagattaaaggtggatctgccttccccagcccactgactcaaatgttaatctcttttggaaacaccctcacagacacacccaggatcaatacttggtgtccttcgatcaaatcaagttgacactcagtattaaccattgcaggcccctgactctgagggcacagcaggaggcatttgcttgctctctgtgcccctgtgagagctgtttagaccaaaggccggaggctggcaagtgggagatgtcctcactgggacaagacacaggtgctgaattacatcacaaagcgtaacctccctgcagggcgtggactcagaggggcaagagagaccgcagaccaggacccacagagacccttgactgggccacaggcatgaactaagagtgctgaagacctaggagaaccactggtcaggtcagctcccagctccacagggagtaagaaggagctgcaggcacagcaggctgaaagtccaccaagggctgaggccacaaggcctctggggcagccacagttttcatgatcacatcatacaggactgagaagcagataacaagagtgacgctcacaggggtaggcatagacacactggggccgaaggggagaggaactctccctagacacacagattgctctcagggtaaggaggggaggctggtagagagactccttaactggcattcctgggtgggtttccatggagaaagagaggacaaaccccaaagagtgaccctaatggcctgtcttgaatccagctgggctgacgctaacaggaggcagtgtgtggctcgaagattcttgaacccacagcagcagctgcggccaccccatcctgcccacagctccagccctgagacgacgaggaggagagtcgactttgcctcttgcccaagggaccatgcccaggtgccggtggctctccctgatcctcctcaccattcccctggccctggtggccaggaaagacccaaaaaagaatgagacaggggtgctgaggaaattaaaacccgtcaatgcctcaaatgccaacgtgaagcagtgtctgtggtttgccatgcaagaatacaacaaagagagcgaggacaagtatgtcttcctggtggtcaagacactgcaagcccagcttcaggtaaaggtgtctttccatataggtggacatttgcatatggtggcacagttgaagccagactgaaagagtgggcatataagaaaaatatcactatgcaaaaatcctaaatatgtgaatgcttaagagcctagacacttccacagcatcaataaggcagtgaacacacagagcactttctacaaacgcttgcgcttttgttctaagtccttcgcatagattaactcatttaaaccccaaactgcaaatcaaatgttcatgtatttgctaaggttgggagacagatagaatgctagccatgagaaaagatctgataaaggtgagtccaggtgaacctggacccaactagcagacactccttcatctcctgctgtaatcctttaatgccagatgaaaacagatttaaatggacatcacaagtagccttgattgcattcagtcactaatgagttcaacaaatactaatgtcctgctataaacctactgctgttctactcactaaagactcagcagagaacaagacaggcaaactcatgcctgcatgggtcctcatggactgtgtgctgagctggtgggaggggctttgggtggggaaaccccagaggatgggaggtttcacaggaatctgagggactggggcctaatgtggctgagggggctgtcccctggtcaggcctgtgtgaacctgagcatctcaggcccaggagagctgatggttctgaagagcccacctttcacctctcagtcctcactgagcatgcagcatgccctgggcttggggacaggaaatggaatgagaaggccttgctttcaaggaggtgacaaactggagaggagtctttactcaagtgtccagctccaggagcctatggagtcctgactgatcttgttgtacacagggctccaggcagtgggcatcttagccttccgctaaagctctgtctgggggtgagggaggaaggaaagaggaaaggacgagagtaagagtaattttttttttttgtcaaaactttaaaaaagtacaactcttttgaataaaattgcataattgctaaccaacaggtcacaaatcttctggaataccttattgatgtagaaattgcccgcagcgattgcagaaagcctttaagcactaatgaaatctgcgccattcaagaaaactccaagctgaaaagggtaggtgatgaaccactcatctgtgacggcctaggcagctctgaacccaagagagaaagctgaggcacgcagaccttctctttgaggtctgggtggctcccagtgtttagccccagatagccaaccctgtggcctttatagcagaagatccagggccacggaacgtggtggaaccctctgagcttctttctcatccttcatcctgcagaaaggatgttgtcaagaccactcttatctcaagggctccattgacttctggccttttgatgcaggcacactggacaacacataatcaccaaaagcctgtcctcttgggtccagacaagccacccactattgctgggcccatggtcactcatccccatacagacacaaaaggaacttcattcattcactcatccactcatagaaaattactgagcaccaggtgctacgtgctttgcaccaggtctattctgggtgctggagattaagcaatgactaagccagagggtggccccaccctcctgggtttacagttgatttttgctggggtcagtccaggtttccaggaaggttggggcaaacccacagactcccaacaaaaggaggacttggcccaggggcttttggcttcaagcctgtattttttatctcagagcagctcataggccagtacttggtcccagacagatgaaggcctgagcattctgcaggtttgcccaacaggtgcatcactgtccctgtctttacattggtggttctccaatgtgagcaggcatcacaatcacttggaggtattgacaaaccctgatgaccgggttccaccggcagagtttccaattcaggaaatgggatctaagaatttgcattcttaatgagttcctgagtggtgctactgctgctgctgctgctggccttaggatcattttgagaaccactgctttatgcactgccatggcacaggaaattgcaggtacatttatgaactgccctgccattatgtttgatgaaaactgcctctgtatgctcaaatgaaacaaaccctatcatttccagctcacaataaatgacccgtcaggacaaacatttcagcagtgagcttgtccgaatgctatctgatcttttatgcttgttttatcttttactggtattaggaatatggttgctttaaatttatattttctcccgggcttttagggattgtagaaaagtttttgcttttggcagtttgtagaaaatattaaagtgcattaaagaaaattgttctcaaggagcccacttgtgtctaagatttccatgatacgtctcagtttttaagacatacatgttcaagcagacatttgtcaataataaaaactttctctttttccaagcagatgcatttggtttcccaaatttgatgtaatttgcctgtaaagtcatcttgatccagtactttttattgcatattttcaatactcagcagggactaaactttcttctttctgactttgtctgcctcttaactcctggaagtgccccagtgatttcagtctatttgagatggcccttgcggtttgtccaggaccactatctctctgcctacccatctatctacccatccatccatccattcattaatctgtcacatacacataggatattttgtttgtcatttcaatgatattttgaaagaaaagcagagttctttggaagaaaagatatgttaggccctagaattttctaaattgctcttgacttgttattagaacaaaagggattttaaaaagtttattgtagattcaggggtacacatacaggcttgttatatgtaaattcgtgtcacaggggtttggtgtacagattatttcatcacacaggtagtaagcacagtacccgatatggtatttttttctgatcctctctctcccccgccctccattctccaggaggccccagtgtctgttgttccctctttgtgtctatgtgttctcattgtttagctctcacttataagtgagaacatgtggtatttggttttctgtttctgcattagtttgcttaggataatggtctgcagctccattcatattactgcaaaggacattatctcatgttttatggctgtgtagaattccatggtgtacatgtaccacattgtttttttaatctagtccaccattgacaggcatttaggctgacttgatgtctttgctactgtgaatggtgctgcagtgaacatacatgtgcatgtgtcttcgtggtagaacaatttatattcctttgggtgggattcctgggttgaatggtaattctgtttttagttctttgaggaatcacctcactgcttttcacaatgggtgcactaatttgcactcccaccagcagtgtgtaagcattcccttttgtccacaaccttgccaatattaaaatggattatttaatcaataaaataacatactttaattaacaattagaatcattttatttacattgtattaaagggaattaaacataatgtcaagtttatatctgaacttgcaccacaatgttatgattattaacatttcttgtcttcctgtggttaaaatagaacagagatccctctgggaaactgctgatggctatgaagtctgcagcctctagctctgcagattcctgggagctcgctcgagagtggtgacccatctgtcagcacacacctaaactgacacctagcaacaggacaattgtttttcttttctttttttttttttttttggcactctactaatttttgttgttgtcatctttttcagaaattaagctgcagctttttggtaggagcacttccctggaatggtgaattcactgtgatggagaaaaagtgtgaagatgcttaatggtgttttgaggcatccctccaacctctgtgactactttatccatgaaaatgaagcaatggcaggtgggaggctcttcccaatgtgctttcttcatgcatgcctctctgcttggtgttttgttttttagttgcatatatgtggggacagaagatgggcatgtccaggtcctctttgctggcaccgaacacagccacgcacctttgttcagcttgatggtctacccatcaccaagtacaaaggttagggtgaggtctgattccattccctacagcaaatcagagtattggggtaaattcagccagatatcaggtgaaattcaccccccatatttcacataggttcttttctattttccctaagtgtcagccagtctgagaaataaagggacagagtataaagggaaaaattttaaagctgggtgtccgggggagacatcacatgtcggcaggttccatgatgccccctgagccttaaaaccagcaagagtttattagtgattttcaaaaggggagggagtgtacaaatagggtgggggtcacagagatcacatgcttcacaaggtaataagatatcacaaggcaaatggaggcagggcaagatcacaggactacaggactggcgagaaattaaaattgctaatgaagtttcaggcacgcattgtcattgataacatcttatcaggagacagggtttgagagcagacaactggtctgaccaaactttattaggtgggaatttcctcgtcctaataagcctgggagcactacgggaaactggggcttatttcatccctacagcttcaaccataaaagatggccgccccccaaagcggccattttagaggcctaccctcagggatgcattctctttctcagggatgttccttgctgagaaaaagaattcagtgatatttctcccatttccttttgaaagaagagaaatatgtctctgttctgcccagctcacaggtggtcagagtttaaggttatctctcttgttccctgaacattgctgttatcctgttcttttttcaaggtgcccagatttcatattgttcaaacacacatgctctacagacaatttgtgcagttaacgcaatcatcacagggtcctgaggcaacatacatcctcctcagcttacgaaaatgacaggattaagagattaaagtaaagacaggcataggaaatcacaagagtattgactggggaagtgataagtgtccatgaaatcttcacaatttatgttcagagattgcagtaaagacaggcataagaaattataacagtattaatttggggaactaataaaagtccatgaaatcttcacaatttatgttcttctgccatggcttcagccggtccctctgttcggggttcctgacttcctgcaacacagaggaggaatgaatccctttggcttgggtaaaaatcccttacagaggtctgaacccactgggtgctaactcagcaggttccatctggatgcttcctttggcctgaggctcttcctgtctaagagtcctgaatggacaggtcatttggtctgggggacccctgtgacagaactagtagccctcccctgtgggatctctataaattgggggatttgtgtttcttcctatatgtattagtctgttctcacactgctgatagacatacctgatactgggtaatttacaaagattagaggtttaattgactcacagtttcacatggttgaggaggcctcacaatcacggcagaaggtgaataaggagcaaagtcatgtcttacatggtggcaggcagagagcttgtgcaggggaactcccatttataaaaccatcagatcttgtgagacttattcactaccacagaaacagtatgggggaaaccaccccatgattcagttatctccagctatccctaaccttgtcatgtggggattattacaattcaaagtgagatttcaaaccatatcactgtgtatgtaaacaatggtcacaaagagagaggggtggtggcaataaatcttgaaggataagctgtgttagattgagtgtatctgttcatgggtgtacatgtgtgtgcatgtgtgtgtgtgtgtgtatttgtgtgtgcatgtatgtgtgtgtgtagagagagagagggaagagggagagagggaaaggggacttggagaaggaagtagccaaacaaggagaagagcaggagacaaaattctcttgaagaaagtaactattaaacagatgtgtctaatagagaattatttaatgggtggagtttctgcaaaatgaaaagctctggaggttggatgcatgacaatgtaaatagacaacactgctgaactacacactcaaaaatagttcagatggtacattttgtatgtattttgccataattaaaaattttaaaaatagatgtatctattttaaacatagtgttggttatgactcaagaggctaattgtatctccaatgtccattaggagaagccaggttttatctcccatggcttgcttggtaggtggtagggatttcagtatttctgcccccaacaggatgaggccatgaaactccaaggcctcaaactactttttcctctggttcctctgacttagccaatgcgtgtttcaggagttggagactgtcgccctgccttcaggcagcagagacaagtggaacttgccttggaaagcctctgctgttcctagctgtctcctctccctcttcagcccctgcctgtggtctctgtctgtgtgccactcccgttatgcccaccctgcttcctctgctgaggccccactctgcttccttgtttcccttctcaaatccccaactaacaaaggaaccaggattggaatgtgatgtatcttttattacttgagattaatacatgtatcctgattgaaagtgcttctttcctatgtgcttggaagactccataagaaattgccctcccgtccctctaccccagacacaggaagtcatgagccatgaggaacagcaggctagagaagaccacagccctgccttccaggggctcccagtggctgcatggacttatagctctatgtgtcttttctggttttctgggatatgagtgtcttaagaaagacagcatttttggaacatcttgaattgtctttcctgatagataggtgagaggcagcctcaaggactcagatgtcgggagaagacaaggatcagcagtgtgtgaccagcttggatgcaatacagtggggatgatgcccacctgtgctgtgtacagatctgcttcctgtacaggcctagagacacatcacatatatgtgtttctatgcacaggtctatttctaagtgcatttctatttatattaaaattttatttaatttaatgttatctcttttcaacctgcctgtcttaatctcttcctttcattttccctctaaacacagccaaactgaaataaaatgcaaaacaagcttcatttctcctatccagcatttaatgtctttttgctaagatattacaggagaacacacaacacacgtgcattcacatggactcactctacaccacctttccctgccttttccagaaatgagcccactgtcacagggcctgctgcgttctcttaaaggtcatggggagctctgaatgcccagtgctgtctgggcctgaaatgcaggagcactgggaacacaggagaccatggagctggaggggaaggggcagaaccaggcaattcatgtggtcttggatgctgccaggctcaggattcacaggggggtccttgccctctaccttgctgtcctccttgcagggatgcatggcctgtccacctggcgaccagtcatggccatgctgtgagtgagaacaagcaggaattcagctgaggacaatcttgggcagggcagtggggaccttgctggttggtggggagtgaggtctgtctcagtctgtttgtgttgcgataaaagtctgtttgtgttatctgaggtggctaatttataaagaagaagtttatttggctcacagttctgtaagcggtagcagcagcatagtgcttcttgtgcaggagagagagagacagtgtgagaaagagagagaaaggggaagggtaggagggagagagagagagagaaacagagaggacagagaggagaaagggagaatagagacacagagaggagaggcggggagggaggtgccaggcacattttaacactcaatcttacggtgggaaactctctcattacctcgaggaagacaccaagccattcatgagggatctacccaagcacctcccaccaggccccaccaccaactctagggattaaatttcaacatgagacttggaagggacaaacatccaaactatatcaagatgcaaggtgttgaccctgctgggaccaggggtgggctgcctgcggaccacagggacagcagcagcatagagctcagagccacagacttgggaaggagcccggtgtgctctggtctcagaggacgtgagtgctgtcccagcttagccggtttctacctgtagggccttcaccacctaacttaatcccatctgctcacacatgacctgggagagtgtcaggactgcctgccccccaggggcctggtggaatgggaggcaagaggggtgggcctgggagtaatgtcccatgtgcgtcctaggaggggccctccttctcctacgtggttggtacacttagaccattagatgcatttgtaaaatctgcaaaaatgtcagggacagacagtcatcaaaacctgggggcggacggtgcccctgagagtgtgggggtgaaaatggcagccaatcagtgccctccgctgattctttctggacctctgtgtggtggggtggctgggtgggggggtgcaggtgaagggtgaacagggggtgggctctgggggactcacttgtgcctcagcgaaggggactgttttactcccacccccaggccatgttacttccttcttgctctcttctgtaactccgtctagaaaaaaaattgcttgaaatttggaaaaaggcagagggagatcagcagagcttccaccaccattttggaacgttacttaacaggcctactgcgggtgatggagttatctagggaatgtgcctctgtttgactcggtctttgttattgatttaaggccagattctaaatttactgttaacttgtggagctttttgtccaagggagatgccagtgatttctgtgcagcagaaaagatctccccagatgctgtggattttctgctctttaggaactgaaccagttatgtaactgacctgggatttcccctcatgcccaataactacgactcctccagttctccttcagatagtatcgcccattgctggttttctctttacagagttgagggaatcagatgctccttctgtgtttgtaagtagtctaggtttataactttctgaaaattaccctattgcagtctccatgtgaatcccccaaagttccccacagtccagggcatcaggtttgtccgatggattcagggcctgctgccttccctccctccctctgccccatcccgtgtcgggtccccgcagggagactgaggcacgcctcctcagacacctaccgctcgctatggaggggacagagtgaagggtgtgagtgatacacagaaaaatacccaatggctaagagatgtctttgatggacatgcaccttggccccttgtgtaggggcttggcaactgcagggccacctaggagtcagctgtggtccagagaaggcgacactgcgaatgtactatttggatcctgcccagggaagagagcaagtgctcagacgctgatgatggccacccattaccagataggaacatttttggtcgtgaacttatgatgcctgaagacaataaaatgaacatcatgtccctggagcaattattgttccttttttctggttccaaactccttcagattccttgtttttaataacacacctgcatcctcaaatacagagacattctgagtgagctgctgggggcaccttctgtgtggacacgccggctttctgctttgctaaccgtattcctggaggctttgtcacctacaccatgctgtagcttgaccacccaggtgaagctgataaaactccaaatctgacagttcaagactcagtgactgagccctgttccagaagcaaggtgacagaacctcagggcatggaggtaaaagccacacctgcttgtggaattttgccttgacttccgttgtggatgaaactagctccactggtgtagccacagaagccacctaaaagccagcacttactgaaatgtccaggaaaccagtccagggtggagagcccatgagaccaaatagtttggaaatcacttctgcaaatatcattgctttaattttgttttaaaacaaaattaaagaaaggggaaagcatggtgggggtatgtgctagtgtgagacaaagtagcaatggtgagaagcctgtgtgctcttgcctgcttgcagcggaatctcacaatgcccctgactctgcaacaacatgcagctctccagaaagacgctttgaagacaaaagaagatagagtgccgcacggcccccacgtctctggcctgagccactatgttccttaaaagataaaccatcctagtccctgcttcctgctgcacataagatgatgcctgctggggtcagtgatgatgcttctgtcatctataaccaggtggattcttacacccaaaccttcacgtgattctgctttactgtaacttccgagcaagtgtgatgtgattttgcacatactgaacctccacacttcatatataaactgttggctgaagccctatttcagaattgtctgatggaacttctctaggggactgctcccgggctgtagacctccatttacggtcttcagtaagactccggaataaaaaataattttaattcttgaaaaacttgatatttttctttagtcgaccctagaaaacagttaggtatcactactgtgctttttctcatgatggagaatttaccaatctaggggttggctcctactaaaaaaagaacaaattgctttctaaaaaagaaaaatgattaattaccttttttttaaaggagcaatcatggaagaagaaaaaccagtttcccacggcaggtgtctaacaggctgtgttaggcagatactgattgatacgttgaaaaaaataccagggtaaatgaacagttaataaactttagcagtaagtgatagtagaatggaaacatcaggtagcatgcacaaatgcatgagagggaaatccaaaggaatgaaaatttacccaagctaaaaccaggaaataagacacaataatacagacaataaatgtgggtggattttataaactaatagactagagagtcttagactttattagagtataaaactcacaggatgctcataaaagccactttgaccacaaactaatcctgacatgttgaaaatttgctcaggatgaaaatacactgaacagctgctaattaaagaaagtaggggagaaaatattaatatgaggcgtcatggaatttaggcaaagagcgttaggtggggtaaagaattatgtctcaacaaaacatactctaagacaccaagaaaatacaaataaaatggccctaaaagacacacaagccaatgtcagattataaaaatgagaaaaccacaaatagagctaaagactgagaaatctttcagaagtacaaaaacattaaagctacaaatgagttggataaagtaatgaagtcattattttcctaggtacgtgcaaatgaagatgtggctcccacccacgggactggaggaaatcaacaagggcggaagtacaggagagacagagatgtctgaggactgcgccccgccactctcaggtgagaggcggcaggcaagagccctgaggccacagagacgtgctgtcctcgaagggagggagtgcccacctgtgccagtcatggcgggcgggtcaaggaggatgcacgctcagagccgaccacgggttcaaccttcccacgtcattgctcaccctggtgagagcatggaacagactggagtaggttccagagagtgcaggaagaggggaattggagaccatgaggacagacacttcttttgaaagattttgctgtaaaggtgaggaaaaaaagaaacttttaatctgaggaatgtgagtcccctttaattatcaagcccagaggggcattgaaatgtgacagcagacacagcagcaatgtgtccctcctgccttgaactaaataatgacctcctgaagccaccggctatgtgaactctagactaatggatgccaagtagctacagggtgccatgtgccggacaccattatccataccctatatagttcaacagtgtagagccaatcaccacccagagttctttctgtgaaccaatgagaactcctggcaaacacctttgtatccgcccactccttgtccccttttgcctttaaaagcctgcttgtagcaaaagctgaacaggagcactcctccccaaggcaatgtggaagtgtgtcctgggctgctgtccttcaccttggcccaaataaactctctatattaattttgcctcagtctctttctttaggtcgccaaagaggaccagagaaattctggagaatttggaaagtaacaggctaaagtaactttatttatagatataaatgtttaccttgaaaatgtaaaattgaaattctttactatttaatgcatatatagaaaatatatgataaaaataacatttataatactacaacaacaacaagcatagaacacacccaatgacaagctttacaatgacttcaaggagggaaaactgaacttttattgatggaacaaaagatctggcaaaatggagagacagataatattcctgacaggaagatttaacattaaatatgtcacaagtactagtttccccaaagctggggaggtcaggagtttggggtgctcaccatggctgctcataggagggcaaatggaacctgcaatcaggaggtattctggagctggaggacttccccgtgctcagaccacacatggctactttgagaattgccctgtgactaccttttcttgattggggttccttgaattttgaatttgaagctcttttgcaattgttacaggcaatctccatgtctaagatgaccgtaacgcacccctagataaatagctctggtagatcccacaggcaagaagcattctttttttttttttttttttttttgagatggagtcttgctttgtcacccaggctggagtgcagtggtgcaatctcagctcactgcaacctccgcctcccaggtttaagcgattttcctgcctcagcctcccgagtagctgggactacgggtgcccgccaccatggccggctaactttttgtatttttagtaaagacggggtttcactgtgtcagccaggatggtctggatctcctgacctcatgatctgcccacctcggcctcccaaagtgctggggttacaggcgtgagccaccgcgcccagccacaagaagcattcttgactgagtcttctaaatggacaaagatatatggaacaactgctaattttagaaagtaggagaggaaaaaaaaaaatcacaccccagccaagggctgcttttatcttgcaaacccaacccactattgaagaatgagaaagagtggggttgagcatggggccacacatggtctgatttgccccgattctggctcattccctgaggaacgcccttactgaggtggatccagtggaaaatgagatgtcctccattagacttgctgcacagatgtgggccatggatcagcagcatcagtggcactgggagcttgctagcaatgctgaatctcgtgcccatcctggacgcactgactcgaaatctgcattttaatgagatcccaggtggtttgtgtgcacattaaagcttgagaagaactgccctcaagtcttaaaaatttctgctgaatgtcaatggtaaaccacctaattctgtacattaacatgcaggacaattgatatgttaagaatatttaatacattaaagtatttaaatctcctagttttttttttttttacaaagatcctgtataccattttgctcctaaatagcttccaaatggtttttagttgttgctgtaagtagaaattttccccagttgctggtagtttgtactggagaatgttgtgaatctgactacattataacattttgccacttttcttacttgctggaataatttaagtgaaatactcattaagtcctttgatggcaaatcaaggggcttagggctcactgggaaacaagacggacacaccgggaaacacagcatgcctatgcgaggacaccaacacagacatggtgagggtgggtgctgtgggggtcctagactcctccttcaggtgcaggcttgcctgtaggtgtgtggacagtgaccgaggtccacagcttcgctttcttttgggacctaccagttttatagaaaagcatggtttgaagaagtcccattccccattcctgaagcttatgaggattccatggttataggattttagaactttctataccccatgttctgaatttcaagacacctcctccttttgtctatgcatattcttcagaaatccctgatattctgcactaaaacagcatcttggtatcacacagattttttttttctgtaagacaacacataatagtgtagcaaaaaataaaaaaataaaagataatttacaaatcctacatgctaaagttctgactacctatcatatatagccagggaaatggtcccttcataactcctgagtcttacctctggcttttctttcctttctcttttagtgccatcaacacagggtcccaagagttctcagccacatcagctccaagaagaacttgtttcattgaggatttaggggaactgtctcattggcgaagagaagttctcctccccctgccccgatgtgactcgttaaggtttggggtgccctggctcttggagctttcatctatggtctaaaccttgaacaccataaacattaggttggcagttcttggagcttgggtaactgcatgcacatgccttgttcacacatgtcccagtatttttacttactctgttgagggagtttattctttcctttgaatacatttcactcccacctgtaataaactcccaattggtctttctacttttgtatctttaggtgaattaaaaatttcatttttagtagatgtttcatatttgtgctacatccttctgaactccagaatcatatgtaggcatacgtgtatatgtgtgtaaatatatatttagagtatatatatatatttaatacatatctataataaattctatattcatttccactctggtgttaggcttcattgttctcactgacaggcagctctgggtcctgggagtctgccattgttggactccattaacaggctccctagcccttccactgatggctgcatttggctaattttggggaatgggagcatgcggaaatatgagcgcagctggagccagtgttgggatatttcttactggttgctggaacccacttaacagcagctgcattcttccgccaggggccagcgctcctgctgggcagtccctccccgccacctacagcaacccctagtgcgtgtggcaggcagagcaatgcttccagagatgtgtacatcctgagccctgaaatctgtggatatattatgcaagctggtaaggggaagttcaggttgcagagggagttaagggtgctaataggctgaccttaaaataggaagattatctggattatccagataagcccaaattccttaaaagatggtagaatggtaggggagtcagagctgaagtgattcaatatgagaagaactccactcactgcaggcttgaaagacagaaggccatgaggcaaggactgtgggcagcctctaggagccaggaaaggcaaggaaatgggttctttcctagagcgtctggaagaatgcagcaccccccccccccacccccacactgtccagagcccagtgagcccgtcctgactctgactttcagagctgtaggatcacaaacttgtgctgtcagctgccaaggcggtggtatttgttcagcagccgtgggaaactaacacactgggcttggccaccactgcatccttcacccgtggggtctagggatggtgcacgtgcccctttcactgactgtgggtcctttaccctccgttgttggttttcctttgcaaatatccctctgttccctctcctcagataccctgtggaatttgtctccaatttcctggcaggactggggatgagatgggaaactaaggggggaagggtcaaaacgacctcatccgcctccagcatcctctagctcagtcagtgcccactgtataattattgtcacaaaaccacagccagataattcttttttttttgtcataatcaaagggccataaaatagatttaaagcaaaactcacactatctctgtcattacttggtgcatttttctcaccctcaaaattagctgtttttttcttcatagaccaaagagaagtaacaaaaataaacttgtgccgagttcacaagcttcagctggatgtactggggctgggtcaactcaatgccatcaacctcccacagggtgaacgggagccgctcttcaggcccacctaagcatctgctctctcccatggagggactggtgtcaggcctccagtaggggagaggtgacttcagcgtctggacagcctcctgtgcggacctggcagcactgctggtggtggtgatggctgacagtgcctttgtgctcccaccctgcccagagctgttagatgctctccacacaaggccttctgccctcctctgctcctacaccctgaccccaatcacacaggaagcatccccatcctggggtcagtaccccgttttcagaaactcctctctctctcacacacacacatgcacgcacacaccattgtccctcctgagccagggctgcttcccagtgactggcagcctcccacctccctggctgcatcctggcaggctcagcccaagctgtgggaagaccagggcctaaggaagccatgcggaaaagaggacagagggaatgaacagggcaatgggtcatgatcaaaggagccatgtggtctgagtaactgcccacagctgtggggccaggcttgggtagtgggaggcaaagaggctgaagagtgcagggaaacactctcccctcagtattctatccatcttttcaggcaggcagtgtctggctaccttgtggtcaatcctagctaacagctttctttcttagccatgttttagcacaaggaagcgagtttcaacatcttggctgggccatgggagcagactggccagtgggaagtgaggtcagagcagaggctggctctgcagtaacctcacagaccctgcatctgagttccaggtcgctgacccggaagagggcagaggtgcagccacaggccagctcggaaggcagctccagtttcagctctgccatattctggctttaagacttcgccatgcagctcagccctcagtggctcacctgcagcttgggaggaaagcctgcctcccacttcagacagggctgctggcctcccaggagtgggcagcgtgggcaggcagagcagcttcagtggacttggaatgggagggcagtggcctttctccgtctaggccatggatgtatttggacacttttgtgagtcactgatggggtcaagccaggggcctgggacagatggaagagcagcaaggtacccatccttgcctccgctgcctcctcccacgggctggctgcagacttcctttcaccagagttgagaaatgttacttctcaggtccgtttagttcctgagctgacacagagtttgattgttgcaacttcaaagtagtccagggacaaagaaagactgcaattctcttttccaaagaacagagagttctcagattgcagtatagggagggcttgagttcgggggcccctaggttttgcctaaacacggggagcatctgtggctcccaggcttccatggatgtggagatgtgagtccggggacctctctgagaaagacaaccacgggagggtgaagatgcttctccctttcctccccagggccctcctcccctgtcccagtgatctcgccaccagagacactgcagtgacgggcctccgggactttcacacagcaggctcgccccagcgggtgcgcatgtgcaggtgactggcatgctctgcttccagaaccctgcctgcccttcctccaggagcctcagggctcacacctgggcccttgcaggaataggtgcacatgggaagtgtgtcctgtgcctgctgaagctcattcagcctcaccttgcaagtaggaaaagcataggacatggagactgctcgctgcaaaggaggaacgtgaccctgcggtgggaccagctttaattgctaaatgttacagcaaacttcaactataagacaaaactcagtgccaggctgcagtcccagaattgctcaaagtccccccatgcttctctctgacaaagggagatgtgacgaagggagaagtttctacagggtcttccctaattcagcaatccctgaagcaagacttgagggccctgttgtgaggagaatcactgaatcagaccatcctatctgttctgtagagatagctgagtgccagagaggttagacgactttcccaaacgcgagctgcagcccaggggtgctgaccataggccagtgcccatgctcacagtgagcctggctgcactgggtgttgtccccagcttaacatctggcttgggaagtggccagtaaatgatgggtctacgaaagaaggggtggtggaactgttttctctcccaggctcatttgctttgaaagggaactaatccaaatgtgacagagctctccaggtatggacttggcagcctcttgggagacctgcctctcaggagacccctaatcctacagatggagaagggctttaggtggtttctggagaaatctcagggaggtcagagggaagggactgaggcctggagacagacagagaaatcaatcaatcaatcaatcaatcaatcattccatcactaaatgacttatttcagtagcttcatctgggccctccagcccaaggtggctccaaaagttgtgcagagaaggggctctcccacagcaatcccgggagaagctggaggtcttgtcttgatctgcttttccacagcgtgtataaaagtgagagagatacaactgttcacatgcagaagtagaggctctgctgatgtatgcaacctggggagggagggagcccaggccctcgctcatagcatgagcccgccacgcttctgacatgcaccagtttcagtgggattcgcttccctatgttcaacttgtgatacaggttgtgaagcttccctcacacccaccacccactatgtgttttgttccttctcccaagccctgcctactaggtcaaaattgatgtgagctggtaaagctggtgatgatggtggctgtcattctgtaaacagtcctgctgttcctggttccaacagaagcctgctctctccagcccaagacccaaggcaggactgccttcttccatcctcagagccagcaatgcagcatcctcgcatctcagcctccctctcttctcttccttctgtctcattttctataaccctgtgacctccctctttcctgtacaagaacttttgtgtttgtattggtcccatctagataatcccagataatctccccatttcaagatccttaagagtaatatatcttaatacataagagttaaactaatagaaaagaaccagaatggagaacttccaatttactagaagaggaagagaaaatcgattctccaaacatgaataaagggaaaaaatgatgggaatcatgattacaagaaaataaaataaataagttgtgaatggattaaaagaaaatattagtgaccacaaaaatgtgactggattaaatttccctactaaatttccctaccaaaagacctactaagaaaccaaggaccagtaatataatgtttacaaacgatatctgtaaaatgaaatgaccataaaagattatgtgtaagtaaattgatgaaactaggtctcaggaactaaaataaaatgctgttctgaaatgttttagaaaatgcattaaggccccaaaatgaaagaactgatataaacattagaaaagaggaggtaaaacatctctttgcatatagttgcttacctggaggacttaagactcaggtgaaaatgctgcctggtcagtggacccccaggagcaggtggcgcccctaccttttatgctcggtggaacctggcactgaccactatgtttagaacagcctgaccccacggtaggcctcagaaaatatttctcgacgtactaaataaagccaccatttaatgtcataaagaatgattcatgtggaagatgtaataatcctgaacccaaatgcatcccaaactatatagatgccttaaaacagagcaaaagtggacagaatcatcaccaggtgacagggaggcagccccagtgacagcaggcatctttgcatgcacctctcccagtaagcaagagctggcagatgccaatcaggaagggctggaagaggcggggcacacaggcaacaccctcatcagggggatgcctgtggagtccatatgtgcacccaggggggttgaggaacaaggatggatttcccaggaggctcccgcccataattgggaattgactgtgcactgaagaaatccacctgggcaggggaggaggaggaaggcggaggaagagcacagcccagggaggaggaacacccagagcctcagaggcccagggcgtgggaggttggggggtgcctctggtgtaggaggccttccttccttcctcctctgtcctcccaggccagcttgctggcttcacctgaccccttgcctggctcaaaggcaaccttttgttactactttgtcccccatttggcttatacttttcttcttgtttctctttctcttccctcatttccttttctgcatccctctcacctctctccactgggcttgttgtgggaatgagctacagtcctgtgatacacagggacgcttccatcagcaacagcccacatatacaacggtgggccaaagatatagtgccatgtttccattgtaccttttctgtgttcagaaatgtttagatgtagaaacacttaccattgtgttacaattgtctgcagcatccagcagttacaagctgtacaggtaggcagcctaggagcagtagaccataccatgcagcctaggtgtggattaggctctatcatctaggtttgtgtaagtcactctatgatgttcagacaatgacaaaatcacctagtgacacatttctcagatatagccctgttgttaagcaaagcatgactgtatatgtcaatcattatctctatgtactgatgtttttttttggttcctcattttaggaatctaatgaactgcatatactgctcatgtattctctccctccttctttctctctcttttttctctctttctttctctctctttctctctctctccacccccgccctccccccctccaccacacacacacacatacacaaatgaacaattcttttacaggactggggtagcttgttgcatttggatgcttgttgactatttgattttctggaatttctcccaagcaagatattgggtatgtacaaggagggatacacagaataagaattttgctgttgataataatagcaaatgatgtaaataacacatatgctcagaatagggactaggtgaaatcagttatggaacattattcagcattacaggtaaaaaaggaactctttatataatgggggttggaaggcggcaacaacaggtcaaggagcaagtaagaatatttctggtattcccaagtgccaatggaatgcgaactggggtagtgggctggagactggctggcaaccagaggtagggtatgggccacctgatacaagtgcaacttgcaggtacttgacactccatttagccaaaattcaacccttcacatttcctgcccaaatctgcttctcctccactccctgtttcagcacatcccaccactacctgctgctgaagccatttattgtctgggggtaagacaagaaatgacaataaatgactcctccttctccaggccgtgttaactcaatcagctccatagctccaggcatggctcattttcccttttgcctgttaatactgtgaggcctctgagcccaagctaagccatcatatcccctgtgacctgctcgtatacattcagatggcctgaagcaactgaagatccacaaaagaagtgaaaatagccagttcctgccttaactgatgacattctaccattgtgatttgttcctgccccaccctaactgatcaattgactttgtgacaacacactctccctgcccttgcgataatgtactttgcaatattccgccacccttgtgaatgtactttgtacgatacatcttccccacccttgagaaggtactttgtaatatcctccccccaccttaagaaggtactttgtaatattctccccacccttgagaatgtattttgtaagatccaccccctgtccacaaaaaattgctcctaactccactgcctatcccaaacctatgagaactaatgataatcccaccaccctttgccgactcttttcagactcagcccgcctgcacccaggtgattaaaaagctttattgctcacataaagcctgtttggtggtctcttcacacggacgcgtgtgacaaatcccccagctgaagtcacctttgcttgcagctgcaatattccaatggccactgagaatcatactgaaaaaaatagacatcttaccatgccatgcctgtgcatttaaacaactgttttcttggttttcaatattttaggtcaaatgttgggcaaagtacagtcttgagaaaaaaaacaaatgaggattttgacaacagaaggtgtcacacaggcataggggtggtgagggtgacagcagggctgtgctgacatcctcatcctacagagagaagtgccaggaaatcctgggagatgatgaactgtgagagtgtgatgatagttttcaatcttataaaagcaactagtagaatatctatctatctgttgatcaattagtcaaaacagtgagaggcagaggaaagaataataagctgctgtgtgaattaacgtctcatcttctatattcaggactccacatcctttaggagccctgggaagtggaattgggaggtaaggagtgggatgggcacgtgcttttcatcatcttcaggcctctctgcatttgccttttactatgggaatttgacctttttaaaaataactttatttttgaacagagtgagcactacaggaataattcatttagaaagtgaaattcctgcataacaccatgcctcaggcacaaagctgcaaatggttggaaatacccagatctcctttctttgaccttaagaaatcactgtttgcattcttaacaaatgcaaattcttctctgcttagtgttttacaactagcttacagcagtttatatacgacagatctctttcagtgcatgcacatattttggttgatgttttaaatctgatttcacaaatactaaacattttatttaaaatttactattgggctgggtgtggtagttcatgcctgtaatcccagcactttgggaggctgaggctgaaggatagcccgaggccaggtgtttgagaccagcctgggcaacatagcaagacttcatcgctacaaaaataaataaataaataaataaataaatagataaatctattattgatacatatttgggctgtttctctcattttcttttcttttagaaactatgttgcagtgaataatttttcagccagctttgagcacgtaggcaaatatttctgtgggataaaaatcctatatgcggaacattgtgttgatgaatatgtaatttttaaatgtttaacagattgctaaattgctactaacaaggactattgaattcccactctgccagcgtggcatgaaggccacatatcaatccagcatcgttgttgtgtttaacttttttccaatgtgtaagaaaatagtgacatttccttgttgggttaaatttttatttttgaagagcttaaccatattttcacatgtgtagcagagacatttatatttattttactgtgatttgtgttcatgacttttccccagattttctactggattgtttgtctttttaaaaaattttcttgccgggcctggtggctcatgcctgtaatcccagcactttgggaggccgaggcaggcagatcaactgaagtcaggagttcgagaccagcctgatgaacacggaaaaacccagtctctactaaaaatacaaaattagccaggcatggtggcacatgcctgtaatcccagctactcaggaggctgaggcaggagaatcgcttgaacctgggagacatgccattgcactccagcctaggcaacaagagcaaaactccgtctcaaaaaaaaaaatttgtataagtaagagtccttagatattatgaaaattaaaatttccagtgtcacatttctcactacttgtcttactccacacccactagcatgactataataaaaaatacaggtaacaagtgttggcaagcatgtagagaaactggaaccctcaaacactgctgatgggaatgcaaaatggtgcaactatttttggaaaaccatctggcagtttctcgaaaagttgaacatacagttattatatgacacaataattctacttttaggtatatgcccaagagatagaaaaacatatgtccacatgaaagtctgaacaggaatgatcgtaacagtatttattaaaaacagccaaaaagccaaaacagtagccaaaataaccctacttctcattaattaatgagtggataaataaaatatggtatatgcatacaacaggttattatttgtaataaaaataaatgaagtagtgatacaggctacagacaggaggaaccttgggaacatgctaagtgagaggaaccagacacaggagatcacacacagcgattccgtttacgtgcaatgcccagaagagggacatctgtggagaaagcacgttagtggctcctccctagggctgaaaggggatggagaaattggcatataaaggctaaaaagtttgaggtttctttttagggtaacaaaaatgttgtaaaattgattgtggtttggatataaaattctatgaatatactaaagtcattgacttgtatgcttaaatgggtgaatcctacagtgtgtgaattacctctgaataaatccattataaaaccccctcctcattatcagggagcccagtcatggtgtagatgatggtggtcccagccactcccggcctgcacctcctgggaccttcctagctgggtctttcctaaaatcctgattatcttgagtcatgagcaaaataaaatgctatgaggcagtagttcccagagcaaccagtgcctgtggtcctgatgaccccaccttagacagaatgtgtttggtgatgtgaacattgacggggggaggaactatgccaagaggagaggagggctgcctcctgtccctatgccatgggggcccgtgcacaggccctgggacctctaagaggccccaccccagccctgaaggagcccatgagagttctggttcccctgcgggcttgtgggttcacacccaccacagcgctcaacaaacactgcctccatccttttccttttaccaggccccttcccctgtggaatgctcagtggaggacacaggcatctcttggctctgtgttgtgcaacctcccatggacacttgtgttctgctttggacacaagatgtgtggatcagtgtggcagttggagtgaggcatcgccacaggccaactgttttcagacaactgatgtgtggccaagagaggaaatggattccttttgagtagattgtctgcttgaattcttggctcattttgagccaggacgattgaggaaattgtctttttctgttggcttttaaagagctgtttccataaaagggaatttagccctttaccaaatatgttctaaatgacttattgtgtgttccctttcctctttggtctttgtggtgtgtgtgtccggtgtgtgtgtttgtgcacatgtgcacactatacaaaatgtatagccagatttattattctttactgttggcctctgtgtgttgtaccagcttagaaagggctccctagtcgagcgtgcaattcagtttcaaacacttgggcctttaacccagggattatcagggccgactttctgtttggaattggacctcaggtctgatgtactttgggctgatctgtattttatcttgcaaagagaaatattaatttccaaacttgtgagttcttgggagctcccctactgtctccgaggcaggccctaaatgcagagcaggatgaagttctgctcctccatggaacctggcttgagcagacaggtgtcaggtcctgagatcacaaacagggtagagaactgtgtcccaagtgagcagaatcaggaatgcttacctgggacatgcatcaagatgggggaagacagggctgataggtgggagggatctgtgctggctcttctgggctacattgttcactccacagaggtagcttaggctggcatggccattgccagctgacatcttctacctggcgtgtctggtggcaactcttgtcagctggtggccccttagctcctggccaggtgcattcctgaatgcctgttggtcccaaagtcctttagcctggttctttgatggttccttctgcttctagggccatggcattgcataacggggctctgaaagacatggctgccaaggtgctgtcatgtgtacctagcacagtccagaggacagcagtttagaaagtcagcaggtgtggaacaaaggtgagggacttctgcgaactggcagcccttggtgagcccatggccttctgagggccagtgtcagaagcgcccttcacttgagcagcatcagagggcctgggctgacctcacaaaggggccatgagtgtgactacctggctggggagtgaagccagagggcagaagtgccctggagtgcagaccccagcagacactgaccaggcacaggaggatgaagtgagtttgttggggacagagaacagccaaggggcagccggcagtcagctcaagtcctcacaaagaagggcaataccacccgtgggccgggacagtcggctcgagggccagcagccaggaacgtggcgaagaacttggatctgaggtgggcccatggtgtagctgtggtgtgctagcaagagtggcctccaaacccaccctggaaggtgatccagagaccatagagcagaaaggcttccttctcagagtgagctgctggaagcccaccagtgtcaggtcagtgtaaaataaggagcgagaagagggtggaacaggtcaatgtgcttaaaacacagagaaatggggtgacagtgaggagaccatctgcctggtgctaggtcctccatgttcacaccccccatctctctcagccgcatcagctccccactaatggtagggttgggggaccatggtggacgtttgggcaagagtcctagagatggaaggtgcttgtcagtcacacacactggtttacggacagatgcaggcagggctgcgccagccagctgatgagcctcctgcacagctgaggacttgatttgcatttctaggggagagcatgtagggtgccagaatgatgtcaccagagggtggccagattaagacctcatgaatcttctggctgtgtgtatctcgtgtatatttagtgcctgatggatatcaggtgtctctttgttttgccaacacgttctgtgttcaacttagatatacgctacctccacatatctttcattaacacaacttatgatttctgcctacatctctatttgcccactctctatacacatcttaactggtttgcctgtcttacaaactacatgctcatttatattctatagtagaattggatatcctcaaaagcaagtgtacattccaagcggttacctacatatgtgtatctcttagattgagataggttacaaggtagggggaagggcagaccctgagttaaaaagtggatgcttccatcaagtatgcttaagtgctctcttgacctctccatgagtctcattttcctcctgtataaaggagttactcacaaaacagccccatgggggacggcaatgattacataagacacaggaagtgcctatggaactctctcaaccctatccttctgaggtttcaatggaggctccatttcacaggcatggttgattaactggtcattgattaactcaatctttggcccctctttcctccctggaggtggagggtggggctgaaagttccaatcttctaatcacactgcaaccagcctctatcctgaggctatctgggatcccaccaggattcacctcattagcatacattcagctgtcgttaaaaagggcatgttagaaataaccaagatgctgctgtgacatctcaaccactcaggcaattgtaagggttttaggtgcttcctgctagaaacctggggtgaagaccaaatgtctatttctaattctactacaatatcaccgctgtgttaacagaagttccttccttttaatcagcagtgccaagaggagctggggtgccagtatctgtgtatcttcagaggcagcaggggccagtgtgccacatcttgccccagtcctgaaaggatagatggtatttggcctgtgacccttggctgaggagccatggtccggctctgccaggccctgctgctgttagtggccactgtggcccttgcatccagaagattccaagcctggggctcaacaaaggtggtgaggacattccaagatatccctcaaaactacgtctatgtgcagcaggcactctggttcgccatgaaggagtataacaaggccagctttagtataacaagttcagctttagggtgctgaaggttctgaagagccaggagcaggtgggtggggtgcttgctccttgccctttcactccccgccctcagtgtcaacaaacagagtcaaactcagaataaaggggtttattctgagccaaatgtgagtgaccaaggcctgtgatacagccccagacggtcttgagaacatgtgcccaaggtggtttatagtttaatattgtacattttagggggatagaagttacaggcacacatcattcaatacatataggtgtacgttggtttggtttagaaaggcgggacaacttgaagtgggggcttccaggtcataggtggattccaagattttctgatggtcaattggttgaaagagttaagttgctaccttaagacctggaatcagctggacgtggtgactcactcctgtactcccagcactttgggaggccaaggcaggcaaattacctgaggtcgggagtttgagactagcctgaacgacatggagaaacttcatctctactaaaaaagaatacaaaattagctgagtgtggaggtgcatgcctgtaatcagagctacctgggaggctgaggcaggaaaatcgcttgaaccagggaggcagaggttgcagtgaaccgagatcatgccattgcactcagcctgggcaacaagagcaaaactctgtctcaaacaaacaaacaaacaaacaaacaaacctggaatcaatagaagggaatgtctgggtaaagatcaggggttgtggagaccaaagttaatcatgcagatgaagcctccaggtagcaggcttcagagagaacagatggtaaatgtctcttatcaggccttaaaaagtgctaaacttttagttaattctctcctggatcaggagaagacctggaacaggaaggagattctctacagaatgcaaatttacccccataagagctggctttgcagggtcatttcaaaattcatcaaagaaatatattttggtaaaatgcttctttcaggacctgttatctgtcttgggatgctatagtaaagttggaatttggtaacttattgctacaaagatctgttttgtcagtccgaagacctctgttttaatgttaaagctggtcagttgtttctgaattccaaagggaggagggtataatgaggcatgcctgaccctcctttccatcatggcctgaactagtgtttcagttttactttggaatgcccttgactgagagggggtccattcagtcacttgagaggtcttagaattttatttttggtttacatcagtctgaacagagcccattatctgtggatggctactgaaactaggaatggaagacacaactgagagatgcctttagtcataatatatttcttttattttaggagtttttgaaggaaaacaaattttatttcattctttattatactaggatggagatgaaacaaaaatatccattaaaatcacttgaaaatggttacagtcacatcaaaaagtagagataagagcccagaaggtagcttgaagggagcaagtttggaccatttgtgcatcatcaatgtgggccatggcaaagatgggttatgacacattgagcgagtacagctgatgctgggaaaggagcctggacagaagggaggctcctctttacaggaaagtgccatctcaaaaatgtgaaagaagtggcctaactagaaaattatgccatcttctagttgtatcttctcaccactaccacggtcataactatttcaggcaaagatcatcagtgaatcctacaaccactgagtgagagtgtttggcgtgaaccattgcagagattacttattagttacaaggggaaaagacatccttctaatcagaaaatttgataaacacctttcttaccaaatgctcaccaccaacactgagacaaattggcatcacatacttcctgaaacgatgtgcacagaggggatgccagcacctgtatatggtattcttgcccagaatgcatactttgaatgtaatcagaggagaaattagataaatccataaatccaatatcatgagaaacaggggaaaatgctggaaaactgttccccaacaaaggagacctacgaagcatgatggctaaatgcagcaggtggtcctgtgttatcttggtgtcaactagagattcagtctggtttatgaatttgaaaaggagagctttgtttctctaaagggttgcagcctacagggtggccattctgacaggctgggaattctgatggaagctggaaagaggcactttgaggggagaagcataagacaggaatctgtgctgaatgggttggctaagtatatatatttaataagctataggaggagtcatgaagattcatgaaagaaaaatgtatgcatgcacagttgagcttcatgcctcttcatgggttgcatcttcaaaaagtgatgctattagcattatccaaaggtggattttaagccctctgatggcaaaagctgaagtagagtcaccaaaaccctcactgtgcatcctccacatgtcaggcaaaaccagtccagagatggtggccagttttcaagaaaggatgccttgtgaagctggtgagctgtcacatcaaaatgcaaagagggaagagggactctggtcttggcctcagatgattgactaatggccataaaagaatgagtcgtttatttcttgttttccagtgttggtttctgcttactccttaggaaagaatacaaattaaaggttagtgaggagggggcacactgaggtatgtctgacatcccatcccctcatggccgggaattcagtttttaaggtttctctgaggtccccttggcctagagggggtctgtttggtccattggagatttagggttttatttttatttctcaacaaaagaaaagaaaaaaattataaaggatgttattgggacaattgatgagattttcatctgggctgtataatagaagataactttgtacctgcgttaaatttcctgagagaggtgattgtcctgtggctcggcaggcacccaaggcatccacggtggcacaccgtgaaggcccaggaatgagatcagtctgctggagtctggggagtgagagggtggcagaggtggaaggcgacaccgagcttgggtcatggcggtgctgacatgaagtgtcacgcagagatgcctctttgtgctcttccttctcgagctcatctctctgccgccttccctttgacctttcctgttcatgtctccaggctgccaggccacctgccctactttcctgttttcttatctgatcaggagagaaggttcactgggaggctgcatgcccgacagtgctgggacattaggccccttattcgtcttgccatgctccgtgggaccttggctccctctggttctttctgtagttctggttatgttgcttgtgttgcttgaggagaggacacctatgaccaggaatgtgccaccaatgagcgaaattaaaaccttagaacacaggcagcctgcagcctctcaggcatgtttaacacctgttctcagtaagttcccgccccctccagaactattccactttcttgggtttctctgtatctaagctttcctacttacaccaataaaatagtgtttttgctttataggccggtgtttaataatacagtaaaccaaatacctggatatctaaaaaattatataccattttgtactgtttcttgttttttttttttttccgtgaatgaatgttttattttttagtttactgtgagcttttgaatgcaggcaataattcaaaagaatcaggtagaaacagattcaataagagactacaacacaagtatctaaaattctttgaccttacagctacatactgctgcaaaagagcacagagagagatttttttaaatgtatcatcccccaaacaacacacaataaaagcaaaaagaaaaattcttggtgacaattcagcttaaacttaataatatacacataggctttatgaaaagaaaacagccatatcttattgggagatttaagaatacacagatttgtatcaggggttggccaagtgtagcctgctgcaggcttttaaacagagtggttacagagacagcttggcctgcaaagcctacaatctttactaccaggccctttagggaaattttatagatgctgctcttttcttttcttttggatatttgaagcaattttattaattttttcttgacatattaaatgtttctatttatttttaaggtatacaacatgatgttttgctctatacattgtgaaatgactactaaaatcaagctaattgacatacccatcaccttacatagttacctttttttgtttgcgtgtggtatgaatactggagatctactcttagagcaagtttcaagcatatgatacactgttaataactgatgtcatcatgctggactatctcttggtagactgagtgctgctgcagagtttgtgcaatgtgagtgctggcgcaaggagcatctcatccccagcggcctggagccacacggcaatgagagaattccagtatacttggcaccagggctggttgctttccacaggtgcactcaggtctcatagctcattaagttagaactaccttcttctacattactgaggaggaaacagtcacagaaaggtttagtaacttgcccagagccacaaagctagtaagtagaagagccaagatttaaagccaggctgagccaggcgtggtggctcacacctgtaattctcagactttgagaggctgaggtgagaggattgcctgagcctgggatcagcttgggcagcatggcgagacttcatctgtaaattaaaaaaaaaaaagaaaaaagaaaaagaaaattagctgggtgtgcctgtagtcccagatactccggaggctgaggctggaagattgcttgagcccaggagtttgaggttgtagtgagctgcagttgtgccactgcactctagcctgagcaacagaactacaccctgtctcaaaaaaataaaagaaaataaataaaaataaactcaggctgctgtgctcttcttcatcagcacctgtctctgaacaatgcccagtggagccaaggtggtgggaaaaagtgcagccacagggtaggggaggagaggggtcttcggatggccaggagtcagaggggcctgtctgtgtaaagactgaggggctcctcagcagccaggaccccacctgcctcctatttcctgagcaagtgtgggtcaagataggattagcggttgcttggtagctgatgagtatgaattagagctgttagttttttgggttttggtttgtttgtttgttgttttttttgagatggggtctcattctttcccccaggctggagtacagtggtgcaatcttggctcactagaagctctgcctcccaggttcacgccattctcctgcctcagcctcccgaatagctgggactacaggtgcccgccaccacccccctacccccacttggctaatttctttgaattgtttttagtagagacggggtttcaccatgttagccaggatggtcttaatctcctgaccttgtgatccacctgtctcggcctcccaaagtgctgggattgcaggagtgagccaccatgcccggcctagagctattagttttttattgtaatttcaacttagacctatgactcaaatatacagcaatggtttgcaactaggggtggcttttgctccttaagggagttttggcaatgcctggagagattattttgttgttatgaccagagggggctgctcctgacatctagtgagtggaggctcaggattctactaactatcctgcaaggcacagggcagcccccaaacaaagagggatccagcccaaaatatcaatagcactgaggttaggaaacttgatatgcagtcaccagaaagttctaagagtacaactgaaagttgtttaaaaaatgaaagcaaaccctcaatttcttgcattcccagtctggcttgtcattcttgagggcaccactaagagcagtgtgctctgtccttctagatattttctatgtacttacatatgcatctgaaatatttaaaagtatattttatagtcataaaatcatgctttctatgtttttctctacttcttttgccacttgaaacatgtctttaaaaagttacgtaaatacacttagatccacctcatagttgtatttcatgagatgatgtgccataattttttttcgcccatctcctaatggaccatgaggtttgttaataggaaaagtgaaacaatgaatattcctttgtatgtgttgctttgatattgtgaggttaaaatcaggtgtcgactggattgaaggatgcctggatggctggttaagtcttgtttttgggtgtgtctgtgagggtgctgccagaagagatggatgtttcagtcggtggacagggagaggaaaacccaccctcagtgtgggtgggcaccagccaatcggctgccagtgaggctaggacaaagtaggccaggtgggagaggaggatggctttgctggctgaggcttctggctcttttcttcctgcattggatgcttgcttctcctgtccttggatatctaactccaggttcttcagcctttggactctgggacttgcaccagtgggtccccagggcctcttgggcctttggctgcactgccagctttcctggttttgaggcttttggacttggattgagccactactggcttctctctgcttgcagacagcctactatgggatttttgccttgtaatcgtgtcagccaattctccctagtaaattccttttatatacaaacttattctattagttctgtccctctggagaaccctgactaataccgatagtatcctgaatttgaattcattggttaaaaagtacatttgcaaaataatggcaaattgccccttaaaagggctaaattacattagatttttggcaatgctgcaggtctcagtacctcttgcctctcattttcaccagctgtggtctcattttgtctttcagatgtttgccagtctgatggaggcaacaataacattttttaattcccctatagagtgagaaattgtcttccattgaatttatctacaatatatgtttacttctaagaattgtttccctttttcttttgcattgcttgtcttgctcttacagaatcatagatgttctttatgcactattcatattaaactatgattctcatatatttcactcacgtccgtgtgaagaggccaccaaacaggctttgtgtgagcaacaaggctgtttatttcacctgggtgcaggcgggctgagtccgaaaagagagtcagtaaagggagataggggtggggccattttataagatttgggtaggtaaaggaaaattacagtcaaaggggtgttgttctctggcaggcaggaatgggggtcacaaggtgctcagtgggggagctttttgagctagggtgagccaggaaaaggaatttcacaattcagttaaggcaaggactggccattttcacttcttttgtggtggaatgtcatcagttaaggcaggaacaggccatttaaatatcacttcttttgtgattcttcagttacttcaggccatctggatgtatacctgcaggtcacagggcatatgatggcttagcttgggctcagaggcctgacaatatatactgcaaatattttgtgcttgcctgtctgttgcttatagtttaattttgcttacagtgtctgtaagattttttttaaaaatactgacacaataacatttattagttcttcccatatgttgtttggagtttatatcttgcttaagaagtccttttccattcttgagtataacagttacaattgttataaataaagttttggtgctgcaaaagaaatagcacttgaatataaaattttctatttttcttctcagcaaggcaatttacttctatagaagggtgcatcctcagagatggagcaatggtgagcacacacctggacaagggaggagaaagggttcttatttctgatgcacgtgggccctgctgctgtgttgttcccttattggctagggttagaccacacaggctaaactaattctgattggctaatttaaagagagtgatgggatgagtggtttggcagggaaaatggtcatggcagagaaggaaatcagaatgagtcagggtggagaatgagtcagggcagagaaggtaatcagaatgagtcagggtggagcaggtgattgaaaaaggttgttttatgaggaagttaagtttaaaagtagaaggcaaagagttgaacatactgacatattgattctttaaaaagaaatttagaactcatatctaacacaattcttctaagacatttataatttaagctcagtaatctatcttggaattatttttatttatggtgtggagttaaagttatccagttaaagttactggatctaactttaactttttaaaatagtaaatttccgtaactgtctctataaaaggtctctgtgttttgaaaagccagctcaccatagactaagtatccaaatatagttgagtctgttgcaggatcattgttgattctctttccttgattattttatttgttcctgggtgggtattgtagagttgctattgagtaggaaaagtcctttacattattcttttaaaaaccttttaaaaatgagaattcccatttattccttaaaaccttttcattgtgaaaccaacacaaaaaccgaaaagttcataatgcatagatgtcaagcagaatgaatcactttaaaatgaacgctcatgaaatgattccccatatagtgtggagagaacatctcaggctccctggagttatgcatgccactcttccctgctctgccccagaagaagcctttaccgtgaacactgcctaagtgtacagccctcaacaccacagttttacctgctccttgaacttcataggcgtgaggtcccacatgctgtgttattttggtttggcttgtgtctttcaatattatgtttgtgcatttcattcatgttgtggcaggtagcaataatatattccttttgttttttcaaaatcaagtgttttattttaaaaaaatttattgtatatatttaaagtatataacacgatattttcatatacctgtagataatgaaatggttactacagttgagtgaattaacatatccatcattacacattgttacctttttatggggatcaagatccccaaaatccacacttttagaaaaatcccaaatacaatatagtaatcttgactttgtcctcatgttgtacattagaactccagacttgtttgttctacatatctgtgactttttatcctttgacctatgtctccccatttcttccctgacccatttcactttttatgttaagtgaagtgaaaaaccagatacagaaagaaaaatactacatgatctcatttatgtgtggaatcttaaagaaaaaaaagtatgttcgttccgactgctgcagaaaatttcgttatataagcacactaccatgtatttatcctgctattgttgatacatattggggttgttttccgtctttgactgtatgagtagtgacactatgcacacacaggcataccttgtggatactgtgccttgtggatttagttccgtaatacaatccatcgcattgtattccatgcaatacagtgaatatcacactaaagtgagtcacacacataatttggactcccagtgccaataaagttatgtttacactatactggagtctattaagtgtacaatagcactaaatctaaaaatatataccttagttaaaaatactgtattgttaacaatgcagatgatacctaaaccttaggcccattgtaatcttttgctggtgagggatcttgccttgatgttggtggctgctgactgagcagggtggtggctgctgaaggttgaggggactgtggcattttcttaaaataagacaacagtgaagtttgccacattgattgacttactctcatgaaagctttcctgtagcatgtgatggtgtttgataacattttacccacagtagactttttgaaaaaattggagtcaaccctctcaaaccttgcagctgctttatcaactcagtttgtgtaatagtctaaatcctttgttgtcatttcaacaatgttcacagcaccttcaccagaaatcaattccatttcaagaaaccattttctttgctcatctctgagaaacagctcctcatctattcacatcttattatgagacagcagcaattcagtcacattttcagttccatttctaattttagtcgtcttgctatttccaccacatctgcaattacttcctccactgaagtcttgagtccctcaaagtcattcatgatggttggatcacattcttccaaatttctgttaatgttgatattttgaactcctcccatgaatcacacatgttctgaatggcatgtagaatggtgaatcctttccagaaggttttcaacctactttgcccagatccatcagaggaatcactctttatggaagttacagccttatgaaatgttttccttaaataacaacacttgaaagttgaaattactcctgcagaatggatgttgtattagctgacattgaaacaatataaatccttgtatatttccactagagctcttgggtgaccaggtgcattgtcaatgagcagcaatactttgaagggaattgtgcatgtgctttttttttttttttttttttttttttttttttttttttttttttttgagcattatgtctcagtagtaggcttaatatattcagtaaaccgtgttgtaaacaaaaatgctttcatccaggatttgttgtcttatcatatgtaaagtagatttagcataattcttaagtgctttaggattttcagaatagtaaatgaacattggcttcaatttaaagtcaccagctgcattagcctctaacaagagagttaacctgtcgattgaagctttgaagacagacattgacttctctctagctatgaaagtactagatggcatcttcttctaacagaagcctgatcgaactacattgaaaatctcttgtttgtgtagccacctccatcaatgatcttagctgcatcttcgggataacttgctgtagcttcttcatgagtactttgccactttaccttgtatttttacgttatggaaatggcttcttttgttaaacctcatgaaccagtctatgctaaattccaacttttcttctgcagcttcctcacctccctcagccttcatagaattaaagacagttagggccttgctctggactagacttttgcttcagggaatgttgtggttagtgtgatctttcatccagaccattaaaactttctctatatcaccaatcaggttgttttgctgtcttatcatttatgtgttcaatagattagcacctttaatttttttcaagaactctttctttgcattcatagctttgttaactgtttggtgcaacagttctagctttcagcctatcttagatatcaacatgtcttcctcactaagcttaatcatttctagcttttcatttaaagtgagatatgtgtgactcttcttttcacattacaatgaggcaacagtagggttgttagttggccttatttcagtattactgtgtttcagggaatagggaggcctaaggagaggagagagatggggaatggccagtctgtggagcagtaggaacacacgtatttatagatttaagttcactgacttatatggtcatggttcttggtgctctaaaacagttacatagtaacattgaagactactgatcacaaattaccataatagacgtaataataatgaaaaagtttgaaatattttgagacttgccaaaatgtgacacagagacaggaaatgtgcacatgcatgttggaaaaatggtaccgatagatgcttgactcaaggttgccataaaccttcaatttgtaaagaacacggtacctatgaagcatgataattcaaagtacaataaaatgaggtgtgcctgtatttgtacatgtgtgtgcctttgaagttaggtatacatccaaaagtgaaattgctggatccaagggtgtgcacttctctctctgacctctaacccaagatttaaagggctcatgtgaataggtcaggtcaaccaagtcaatctccctattttaattcagctctcccctagaggatagcctaatcacagaagtaaaatccatcctattcatagtcctagggatcccacagggcacacacaatagggagcaggactcctgggggcatcttagaattctgcataccacactccctttgttcaatgcctaggaaacttttctagaatttctaaaaaaaattttttaatattttgtcagttgtctctgattcttctgggaccagttattgtgtttaaacttgatcattctctttaatatgctctctcccccaagtcttgtaaaccttgttttcttgttcatttttaaataaagtccacttttgccattgagctgctccatttccccaagaggctctctttgaacagaagggctgctaggggctttgtgcaggtagaatgccctcagaggcagaaattttggaggaatccacatttcaataaggtgtggatactaagattggcaaagaataggagactttagagagaatcaatacaaatacacactaagcaagttctagttcagggtcatagttttatttcctcaatatctattgattaggtgtgaagatgctacaagctctgctgtttcccaagctctaataagcaaaccattagcttccccaggaaaataattttggggggaattgttttcttgctttattttggagacagttaccattactttaaaattaaatactatgatgagagacagagagacagagatatcaaggtaagaaaacttccaaattaccccaaaacttctggacagaaaagagttgaagagggggaaggcaaaaaagacattcttggccttgagtagtcaatgacatgtttatttaccagagatgacaattgatattatgtattctttaatgatatatgatttttacattactcattgacaggtgacagatagtttggagtactatattgaggtcaaaattgcccgaacaatttgcaagaaaatttcagaagatgaaaactgtgcatttcaagaggatcccaaaatgcaaaaggtatgtagctgagacaaggagaaccccttgcactggtaagacttgtgtaccagatcatattcaggactgtggatgaccaggttctagacacagagcatcatttctattatctgttgctgatgccaaccttcccttcccgaatgttatgggatctttggggtgttgcttttctggctggaaacctctatggctggtggcacctttgcccaagttcttgtcctgtttctggaaagaatgaggtacacagacaagtggagggtgagcaagatgaagaggagcttcactgagtgttagaacagctcagaggaaaccccgtggtgggtagctcctctctgtaggcagttcatccagagtgttcagctctcagcagagagggtagctcctctctgcagctggtcatctggtagtcttcccagatctcagcagagagaacagctcctttctgcagctggttgtctgtcctctgctctctctgagtctgggggtttctatggtcttcagagggggaagtgtgtgctgattggtctgtggtcagccatgggtgggcccagcaataagtacaagttccccctctggtctgcaggactggcagcccagcccagaggcctcaggccctccccagcctgggacccacccccttctgcccaggagcctgtctgccttccaccacccttcacagcccaggctgttcatgccaaggggcgcccgtaggccagtgctgagctgtcctcagcaccccccttggcctccctccgtgcttctcggtgcccaaagattggagggggccgaagcaagagggggccagagtattacagctgccctgagcatgcgtgcacccgactggattgcgacaactccggggttctgccccagccttgctccatgatcagagcaggtgccaggagcggggagaggccaggcagtgtaagcaggcatcccaagcctgtggggggcagggagaagttcccaggccctcaagagcacagagatgcccaggtctacccctggacctgggcagctgcagctgaatccagggcctcctgcctcccacaactcagaagctgcgtggctcctgcttatcctggagtcctgggcccactttcctgctgcagccggcgtcttggcagtggccactctccatgtgccgctgctgccatcaccaccaacacaccaacactcacccgcgcgcgcgcacacacacacacacacacacagagttagtggcttaaagtaaaacgaactcattatttctcactattctgcaacctgtgctgtgttctattggggcaggaatattctagatagctactttactcatgtgtttggcacctccactaggatggctgaaacaatgggggggctggctaggcatccttctcatactgctcagggactagccatggggcaaacttgtagagtgatcagtcatcctggtttgtcaaagactgtaggctttcctgggatgtaggcctttcagtactaaaaccagggaaattttggcaaaccaagatgtgttggtcatcctatacttggacattctcacaacatggtgcttccaagggagtcaaaattcttaattggctcctaagaggaagaagcagaagctgccatcagaactgatagagaagaaagtgatggccgccatcttggtgcactgtcaactccggcaccctttgctgaggggtcctgacccagtagaaggtacagcatgaccttcctccactgcagtccttgaaagaccattcctctcctgctgggattccacaagcctgtgattgctttgaagcagaggatgttggaagcaatgcttcttggctgattctgataccagtgggctaggggaggtctccaaatgccagcgggacgttgaccctggatggtgcccgggctcttgacaccttcatgagaaggaattcaaggataagtttgaaaatagtgaaaatacagagatttgttgcaaagcaaaaagaacacactcaagacgtggggagtgtgggtatgtacttgagagagagagtcatgtgcaagagggtttggtgctcctacctttatgggtttctttaaccaaagtctggaatattcatgaaaattcctggaaaaagatggagatttcttggaccggtgccacccatttttacaccaaatatgggtgttcccagagctccatggtgctgatgggtgtgtatttaatatgttaatgagcacataatgaagtcctaggtgaaacttaggtcaaatccagtgccatgttgggtccagtcagtcttagccagcttggtccacaccctggttttcagggtatcatcagcccctagcttctgcagctatttcaacagtttccttttgctagtcatgcaaaactgctgcctggaatgttctattctcctgcaaccaccctgtagtattcctgtctcaattccactagtccagctgctgcatggaagtcctacaaggctctggaacagtcccaagactccagcccaatggccctgcatgctccccatagtctcagaggtccaggctgctgctgcttcaggccaagatgggggacagccccagccaggccaggctgttttcagatggagactgtcacaaaggcaagttcatcacagaggagacaggcttaataaaaaagtcccttactctcctcgtagttgactaaacagggatacatttcagatttaaatttgatattttaaaatgtatataaatattttctaaaagtatattctcataaaaatatatgggataacagtgaggtcatgccccttggactcctggatgatgccccaattctgccccctgccaaggagtttccactgggatcatttgtgtggacagctttaagataattttgctataaacttacaaaaatgacacagtcttttttctctttccctttttatttaaataactgctgacgtgtgttttttgatataacttcctttttttttacatttgtcttggtaatcttctcattgaaattatttccaaattttttctttcataaatgaaactgcattgaaaacccttatatatgcatatttctgtgccctgtgtattttttcatctatttactaaatacccgaagcaggcacaagacacggacaggtggaaatagtggcagataagtgattggcaaaaactgctcagacataatgccaattaaaaatatcctcatatttaggccaggcgtggtggcttacgcctgtaatcccagcactttgggaggccaaggtgggcagatcacctgaggtcaggagttcaagaccagcctggtcaacaggctgaaaccctgtctctactaaaaatacaaaaattagctgtgcatagtggcatatgactgtagtctcagctactcaggaggctgaggcagaagaatctcttgaacctgggaagcagatgttatagtgagccaagatcacgccagtgcactccagcctgggccacagagcgagactccatctcaaaaaaaaaaaaaaaaattcctcatattttaatgaagagcagacatcatagcagaatgccaagtgcaagcagatggctaaatctagagattgaattcttataaaagattagaaataattttaaattaagtaatatttcagaaattcaaggaagtactaagaatgatatatcaaatgcccatctgcctaccacacaaattttacaactattatcattttattacattaattttagatatctattttttaaaatttatttttatttatttttaaaaataaattttattgggtatatttaaaatatatcacatggtagtatgtgattcatacagatagtaaagttaccatagtgaagtaaaataacatatctataatctcacataattttgcattttgtgacatgaacaactaaatctagtcatctagcagaaattccaaatatagtataatttaattaactcatgatgtacattaaacctcatcctatatctgctaatttgtagcttctagcctacatctcccaaccccctacaacccgctctgcgggtaaccattactttatcctctctctgtatatttggctctctcttttttttttttttttttttcagattctacgtgtaagtgtgatcatgcaatatatttctttccgtgtctggcttgtttcacttagtacaacatcctccaggttcatccatgtggccaatgacaggatccccttcttctttaaggctgaataatatttcattgtgtgtgtgtactgcatcttctttatccatccgttgatgggcacttaggttgtttccacatgctgggtattgtgaatagtgttgcaacgaacataggagtgcagatatctttatgaggtgatgattttatttccagagggattgctgagtcatatggtaattctatttttaatttcttcaggaacctccatacagtttttcataatggctgcgccagtttaccttcccagaaacagtgtacaagggctctcttctcgccacaccctcaccaacattcattatctcttgactttttggtaatagccatcctaatgggtattattatttattttaaaaagtaaaatgttacacatctattatgctcccccctcaaagataaccactcttctatcattggtgggtaacatttctacctatgtttaaaaacttttgcctatgtaaaagaattttgtgtgcttttcaaaatttacatacattttggaatttctgttttgttttgttttttatttataggacttgctttttaatatcctttttgggagcaataaggcagctcctgttggggccacagccttagatggaggaacacagccaacctgctgtgactccctgacctcaccctcctcctgcttcccacttttctgattttatccttccttggccaaactcaactggaagccagaaggggcccactgacactgtccatggtggtcatagagcaagggtgcccactggcatggtccagagaagtcagaggataaggatgtccattggagcaacccacagaggtcagagggcaaatgtgcccattggagcagcctgtggaggtcagagggtaacggtgcacattggtgtagtctgtggaggacagagggtaagggtgccattggagcagcccatagaggtcagaaggtgaggggcccaccggtgtagtccatggaggtcagagggtaaaggtgccaactggagctgcccatggaggtcagagggtaagggtgcccactggagctgcccagggaggtcagagggcaagggtgcccatgggagttgcccatggaggtcagagggcaagggtgcccgttggagcagcccatggaggtcagagggcaagggtgctcattggagtagcccatggaggtgagagggcaagggtgcccactggagcagcccatggaggtcagtcttccaagacaagccaggtagagataggaggagtgcagacctcgggggacaaatggagaaaatttagcacaggggcaggggtggagatgtgagagccatatgagtccattattagtctgttgagatacctcaaatgagagatgatgttggttaggttggggaggtgctcagattctgggtctatgaaagtttgtttagaatttgctgattgattagccatggagcgtgagaggaggaaaatcaggatggctttgggtttgagaggttgggaggtggtttgctgtctttgttttctcttatgattgcatcctctatcttgagtacatggcactcaataaacttttttccacttgcccacatctatttatcatgtggagatttttatctgtctctgtccttgcatggggtcctttcctgtttcataaagctcttataggttggactttctctgttttcttggtttatttattggtatttagaaaggaagaaagtgtggatatctgggatccttggaaaataaattttaaaacaatattaaatagttattggcctgattcattcaatgtaaaaaatttggaaattttcaaaaatattaagctttttcaaatcatctgttaataaccttatgtaaatcttaccactgtaaatatattggtatgtattttagtttaaaaatattttatgtttatattttttgtaattgagaccctgatgaatactgtttcatgatctagatttttatttaataataaaacctaagcatttccaaaactgtaaaattattagagagcatcatgtaatgcaaccatttgatattattttatgatgcttccatatattatttagccaattcctgagaattgattaagattttccctaatttttagctactatggacagggctataatgaatagtcttatttctatatgtgttatgtctgatttttgtttccttctaggcaaggttctcagaaatggaattagtcatccaatattttttcacctcttaaaaattttaatatacattgctaaaatatcctctagggttgatcttgataattgggttattcaggtcctctgtttcctgattgttttctgtctaccttggctggtccggaagttaagcaattacttagtcacctctctggcaaacctgatgcccactctctctgtttgcaccactggcacacacaggctccctcgtccctggattccccctcccgcccaggtgcagaagcctggactcagttctgcaaggcactgtctgggttgctggtggcgtgtcctattttctccccaaaactgttcctacacctttatatcttacacaacttcttctctacttgatgctatcattcaagtttacactgacttcatagaagtattcttactttatatttttattctaaatgaagattttaggagagaggagggaaacagtgttctcattcccatgcatggatcctgaaacccacatgttctgcaggactctggtatgagagctacttgtttccttccagccctacagctgcaagctttcctccttggttgctggcacatttttatttccccaaggggtgcaggacctggtaatattcttgcaatgttgcattccctgggtaggactgtctgtgcagcatggggtctctgtaggctacagggagtccatgtggctggatgagagtcagggctggagatggggattttccaataataacctgtccttgggctctgatccttgctctcctggagtgaataaagccacacccatgatggctcagatcacaagaggtgaactgatgaggactcctctggtgagggggctggatcctctgttttctgatgaggcgtggctgactcagacagattagccctgctgaatctaactcctgcctggaaataggaacttctgcttttgtttccttctttttaaaatagaaactgactattctttttgtctctttcaggtggttttttgtacttttattgttgcatctaaaccatggaaatttgaactcaccatgctgaagaaacaatgcaaagatatgtagttatcttctagtgtgttctgccacactcatttccattttaaagaagaagcaaagacacttgcaagaactagaacaacacagttaacccattaacttcatttgtttggcctttttgcatttttgtgtgttcttcatgggctgatgttgaaaatccatgatgtgttttgacagcattgcatagcctattcttgctggatacttcccctactagctgggataatctgctgcaataaatggaagtggtttctacacctcacccaactctgagtacaaattacttttcatggacaaatctttctagataaccagaggacccagccctcaattgcttcaagcatgctggcactctctgtaaggctctgagagtctggctgccttgagagtttccgtccatggatttctacggaaatctcccttcccaggactttttggaagacacagcctgttagcttagaaagttagttttaaccagatccaaccagagagacagctgggccatttagagattttcattggttttgaattgaagcagaaaagttaatgatgcagggagagaagactacattcgtgtgtgtgtgtgtgtttgtgtgtatgcacacgtgtgcatgtctgtgcataagtgtgtgctcacagttagatgtatcagttaatgctgtatgacaagtcacctggtcacttaatggctcaagcaattgatttatatgtctcatggtgtctgtgagtcaggcatctctggatggccagactgggcagctctggttgtcacatctcattgggttacactctgatattgactgtgctgccattatttaaaggtttgatggactctggagaatcctttccaaggtagctcactcccatgcctgcaggttgataatggttattgactgaggtctctgttctccacgtggcttctccacaagactgtacgtcagcttggtatcctggatgacttgttccagacacagtgttcccagagaccaagatggaagccactgtatcctttgtaaactagactcaacccagaacagccctggctcagtgtggactacacaacgacataaagatagagattagggtcactggaggccatctgggaggccagccactacagtgtgtacacatgtgtgcatgtgtgcgcatgcatgtgtatggagagtggactaaggtgataccatgaccgtaaagaggcacttttgaaatcctgatgcttagacagcagcaccaatgtgcaggctggggcaaggagacaatattgtgtaataaccagtagtaatacagggtcagattctaacttagacacatgacggaaggatggtgatgctcagaggccacctgcatgacagctgtccttgagggctcttctccgacagggctgactgcaaccttctgagcctctctgcctaatggctttctctgccaatgaagggcaggctggagtgccagtgggtaatacccttgagaggagccctcagccaatgatagaatttggaggataaacatcctggccttttatcccctgggatataacgccaagttgtgtctacccagtcactgaggagtgtcctgcaagactgagccctagctatccatattgctaatctcactatccgtgctgcttctgccccttactatttccacttttcaactgcctttctggaatcatttctaaataagccacttgtacttgaattttttgtctccaagtcagcttctggaggagccaacttgatagtggaacccagatctactgtaaatggcaccctgagacccccaggggcttgcctggctgagatcagaaatcaggataccctttaccttgacaacggaaaaaccaaattctgccaaaatatttaaagaggtttattctgagccatatgagtgaccaagaaagggaaacacagtctcaagaggtcctgagaaagtgtggctgaggtggtccggttacaggttagtttgaagcatgtcatggagccaggagttgcaggtaaaattataaatcaatacatggaaggtatatattggtttggtcccaaaaggtgggacatctcaaggcattggcttacaagttttaggtgggtttagggattctttagtttgaaattggtagaaaaagttaagctttgtctaaaacatggagtcagtagaaaggaatgctaaggggctctactatctgtcaggtgatgccatgccagagtcaggttggaaaacaagtcacaatgtactgggtcagaaaggacctttttgatgaaattttatggtttgcaaggcatgattcctcaggtccttaaacaggaatttcagaaataaagaaaaaaaggtaagaggtcagtcctcaacctgcactctctaacatctgccagcagttgagctcttgggtggcgggcaggtgaagtggcgttcttcatggccccgcacaaccctgggcccctttctttcccatgtgctggcagggttgtggggacactgtcagagcagttcttgttccattctctccctgcctcaggaatgggatccctatgctactagctgcagcacctgaggacacatctctctcatctaccctcgccttcatccccaagctccgtgggtatgcaacctgtccatctgggggacttggtctcccttgcttcttggcctgagctggccagccctatgtggtctcatgagcagcccatggaggaaggtgttctttgctgagccctgacagtgtgattgaacattggagggacctgggtcttcacatgtcccgggctgcttgtttccatcatactcataccccatgttgtcttagggcataccaaaccctactgcccacatctaaggtcagttttgttaatgtgatctgtgcatgggttcaggtttagctcttcaaaaccatctggcctctgttgacccactgagtcagagtcaggatgaagaattaagatcaagacagtttcactgactcatggaatttttgagtttattgactaacagcaatatttttatatgagcatgaaaggaaatggaatgtgtggacatagaggctcctgagacacctctaaattgtctccttctctaccaaggccgtgttagccttggccacaccaggaaggacacagacatatatcaaagaggcttcatgcagtgtagcttgcccttccaccttctaccacgtgaggacacagcagggaggccctcacaagatgctggcaccttggtcctgggcttcccaacctctagagctgtgaaaaataaatttctgtttcctgtaaattaaccagcctgtgttattctgttatagcagcacaaacagaagaggacagttcctttcctgggctcagcaggggccagggaagaaccagaactccaactcacaggaggtatgtggacatgagggactctgggtcttgggacctgaagtggagatttggagtgagtgggagttgtcctgagaccacatacagggccaggactgacagctgagatgtttccttgtgtatgtatcccggcagttccctgccctccccaggctccaccccatcttcccttcctctgcctcaaggagagaggtttggggagtctgcaaaaacctcacattttcctcatcactttgtgttcattattatggtcaatctccccaaggctgtgtcccagccctgaccccctgagaaaaatgaggaaagtatccacatgtcctccagcagatgggaaagtggccacaaggtagaataaagtagtgtatatgtagcatattttggaactaatttatacttagtgttttcttctactgccacttttgacttcagctgtaaccatttgaggacagccaagcagaggttgccatctttatataaatgactcagggacagcagatgacagattaggagctgaggggtgcagggttaaataagaactcacatttctggggaaggaggaagctagtgacactacactacaatctgtgccccttttccttcctggggttggggtccagggatgctactgaccagatgttcccagcatgtctctggccttagcctctggcacaaaatttgctcaggggcccacctcatggctacactcaacatctatgaacccagtttcctgattcttcactgcacaaattcccgaaggaggagaagtatagctgtctccaggagcaagtgcagacaggcaaggcaagctaggagaggtctttccaaaggaacagggcctgcaatgcgactcctgtcctctaattaggcctgtgcacctgggtcatgtcatgcatcatgagtctggaaatacaatagaaatcaacacatgtcccagaaattgtggatgtccatttcttagggatgcagaaaactgttaaagacccatacatgtagtctgagtcaggcaggaattagtgcatcctcccaggagccagtgccttagagtgggctcctctccccttgctccatgaaggacggctgtgctccaaaagggtcctgagccaggacaccccatcacctcagtgagctcactccccatgagaccctgtcctgggagctgtctcagaaatggttctcaaatggaatgagtagggtggattctttggatccgcaggaggcactgtggataaagcgccttctctgagcttccttctgctgatggagtcagggtcaagagaaggaccaagggtgggagcagacaggggaggtggtgggagggtctcaaaggaaaatctgttcaagtctggaacaaggcagtgcagggctgtgtgggttccagagacccacgcaccagatgggacaaagtgcagcagctgtgtctacctcagtgctggcaggccgcagggaggtctccgggcctggctccccactctgccttgcctgaatgcccatgatctagggaccaccctcccagcacttctatggagggtacgtcccaagacgatggtccaaacgcaccacaggtctgtgttaggtccccccaggctgaccctgaaacgcagactggtgggtgcaggtagtttatttggagatgatcccaggaggcacatgtgagaaagggagacagagaaggggaaacacaatgtgtctgttatcgatgggttacactggggccgggggtgtttattctgctggggagctctgagaaccatgtgacacacactctgaatcgggtgccaggaggctgggagactgggacattcacctgcctcacttctgaagatggagcgtggctctcagacttgaccttaggagttggcaaccatggcccgaggaccaaatgcagcccagtctggttgtctccatgtgtaaacaaagtcttgttgggacaggactgctcttatttgtttatgcattgactatggctgctttcaacttacaaaggctgtgctgggtagctgagaaagtgactaaatggcctacaagatcaaaatagttactccttaaatctttacagaaaatacatgctgaagcctgatctgggagatgtggacagggtgtccatagctgctggctattctcagctaacacactaggtatacatgcaccctgagcattaatgccaatgtcacatttgttatgtgggatcccgagtccctgtcctgctccgtgtgcacatctgataccctgggaggccaccctcactgcccctctgcaacctgcaaggggccctgagatagcagctcagacgcaccttagctgtgcctctggaagtggctcaggaggcccaataagggagaaaaacttacccctgagaggccaggaggctgccctgctgagaataactccatcaactgcccaagccccttcgtccagaatcatggcacacaaagcttcttaaaatgctaattgttaagatgtatactacatgatgaacttagacaatgaagaatttctaaaatacctgagcatgaactcctaacacatggaaagtaagaacacacaagcacagagctgctcaggcactgaagggccatgttgaggaactgccgacatgctggaaaggagaggacagcaggtggccaggcccgtggctaggacccactcaggaatgcccgcctgagcacgtcttgttccagaggtcaaaccgtgtcctccagggctctattccaatggtgaagaagcaggtgcaggtctgagggagcaagcacaggaagggacagtgtgtgggggcttgggatgcagaagcttgtggcttctgctatcaacacaggttccatctcaatcttgcccattcccagggctgggctctggaccccaagtgtggccctccagcctgagttctgggctgttccagactttcagggtgatctgtggctccctcctgaccaaggaacacctgtagtagcaccctcctccctagccagcagcctccaggggaaacccaggctgtctagtgtctttcatcctccaagaacagcatggcacactccattccagagggagctgctctcagatttaaacaagtacttaacctattaactaatcctctgataaggggatggagtaatgctagatgtgttgtgcacagtgtcagggttcattatgtccttgtccccagagcaggtactgcagctcagcaggagccaggacaggaccagggagggagggcagtggggtccctcctcagcctccacctgcctcaggctctggattaggggagggggaccctgagaactgcacactcagagagaggtgatgtcggatccccaccaggctctttcttcaaaaggcagaggaaggctggggaggaagaccagagaggaaagagtctctactcaggcctaggagactaggaccctagggggcaagagcagtctgaaggccatgtgccctgggtacaagcagctgtagtggcgtgacatggcagagtcaggaaactcaaactggccaggagactgcaagtggacccctggctgcctgcccctctgtgctcgccactaaggcacaagcaaggtagcctggtagaggctgctgcaggctcactcctctaagtctctttgtcagctgtacctgtgtccgcaccacaccccatgcggcatccacagctgtatccaggagggaagctggtgtcttgtcttacattgttcagctctgggctctcttgaaaagggcagttgtcaatgtcatcttcaaatttcccacacatggttctgcccagttgcagattcatggagaatgtcatcttatcataaccctgttgaataaaaaagattaaagtggacagactctttgagttgctcataggtaactccttgtgaaaatgcgaccttgtaggaagaggctgcaacactctcctccactagggagctcgcgcatgggcctggcatcaggtcactggaggtaaaacccaggagaccttctctagactgaggagttaagagcaaacagcaaatatgtgtggtgtgtcctgggacagacacaggctgtcaaaccctattaatgcatcctgtatctccagcttcacctccctgtctcccatgatgagacccggcttcactcagcaggcatgtgagcctgcagctgcattttcagaagacatgtgctgcatgctcgggaaggtgttagctctccatcagttttcagggtaacctcagccctggggcaaggggagcctcatctagagtgtgttgtccaaccttccacctgacctccagcaagaggaatgcaagaatgctacccagtgctcccactacacacagggacacacccttgggacaacggctttaagaaacaccgtctgccctattgcaaagtgcactctgaggttctccttgctctccttcccactccattctatgtcattccactccatagactccctccccatccagccaggaccttgcacagagtctttccagagcttaagctctgtgcggcactggggtccctctacccttctttcaggttcttggtgccgacagaggaagagcaatgctccttctccctctaaaccatacgttctccactaggagggcattttaattgtttgtgcctgcagcccagatgaatggcacattcctgaatcatttaatgattccattaaaaggagaacattttaggattaaggaccatggactgtggaagagtgtaacacaacattcaactcattaagtgtagatgcagggaggagcccagagcaggtggaaatcagagaagaactgacttcacagcggcctctcagggccgatggtgcttcttttttacttctgaattatcagctctctttgtctctctgtctctctgtctctttctgtctatttgtctctgtctctctcttccctttcttttactctgattgtctcttttcctaattatctcttttttaatttctttgaaatgtttctcagtttctgtctgtggacgtttttttgtgtgacccatttcctcacctgatgcatcattttctcagttttccttattttgaggtcattcttcagttaagtgatgccataacaatcatggaggttgaatactatatctagcgttgagtagatctggactcaaaaaaattataatgtgtatctttcataaagacaaaaagcaaatttctgaggttgtattttatacaagtttagactacaaatggtgaaccaggagtcctggttaagccctgccccacacgctgccacccctgcccatcactcagcagcctgtgctggacactagtgcagaaaaggatgtgctcatcaacctgctccttccaggaagccaggacaggcaccagcttgtaggcataccagtccttgctctgcttgttgaatgtgtacacggcaaactccagggtgggagggagataaacagcaatttgtttttggtcattccactcctcttcctcttggaaacgccaagcataggtaaccaggaactggaagctgaagagaagcagcagtggcgcacaggacagagccctgctcggcggcagactccacatggcgcagggcacaggaagcactcctaacctccagccttcccagcctggactcccacaggagcctactgcacacagttctggcccttaaactcttgagctcaggtggaaactcctccctccaggcctcatctctggcattataatctgtccctcccaaatgtggcttcgcctcctccagacaaagctgtttcaatcatctcttgttcagggagaagtaacagcaaccatgggggtgggttagaaagataagggaccccagtgggcaagagcagggcatgaggtccagccaccactgctccctagtgcctcagtgggctagaggagagcacccacttcctcgggtgtcccagggtcagtccctgaaataagaatagaagtacaagaggtgtgagtggaaggtgatccctggacatgccagtggggtggggaaacaaaaccagatgggtcaaggactaaaaggaggagctgccaggagtaaaagtgctgtgagtgaacagaaggcatggctgcatggggactcataggaaggctccacagcacctgcctaagtatcagcaacctgatgctctggggccctggggctgagggtgaagactgctcttgggcatccttcatggctgctttaaagcttaggacctgctgcactggcacagcaccctcccgactaagaatgtgagaaagattagtacaggtacttgcagctggattcagccactggagatacaagtttggctaagttgggggatggtcctaggaaccccacactgctggaagtcagggatagaggagggggcttgggacagaaacaatgccatgcattcagcaccaggtcactttctcctgagcatagctggacatagatgtggcctgtgctgagctctgaccttggatgtggtggccatgaaggacaatgtgcccaaggtgaggctactcccatgagctggtgcatacccttccttcccaggcctgcagaatggagggagcatccaggtgggactctgagtctgtggatggtactcacaggagtgggtctcagcagagtttcctccagcacagtcctcaccctctggctgaccctctcagccctaagtcatgagtgacaaatgccatttcatggttccaccccctgagatccttgttgtcccttccagcagctggcagaacttaatgaattcacctgagttctcctggagatgcagagagttgggggtaggggtggaagggtggtcctagccttggagacctgagacccagtccagctgtgccaggagctgattctgcaccttcacccttccctgagctttctgggcctcccttgtccactcctcagatgggcatagcattgtccatccagcctccagaggcttgttgcttactggacaaattgccctcatggagtcaaagtgctgtgataatcacaaagctgtatgcttagattggcaattgttctgcactggcaattcctttccttatctctgctgagggtacatggggaccttgcacatttgacatttctccccagtgttcaggcctggaccacagcctggggaaggaatgaaggcagggctcagcactgccactgaggctgacaacaaagtgcagactctgggaggtattctcaccactgtgatgactaaatgcacctgcatatctctccagaggggagcacagatgaaggaggccaaggcacaggaaattcctgcagaaaggggctcagagggagggcgtgcaggggccctggagacaggcacagtctggcttccttcccgtgctctctccagagccccacctgggtcctccctcgcactctcctcacccacctggagcaccctacccatctgcgccatgtactgtgcatctccttgatcttcatatagagtctatttttctttctgagtcacagaatcatcatttgttcaagtcagatttctctccattgtgggaacaggtgaataaactcacccccgctccccaacaagagtatcgtggccaagtacaggaatctgtagtttacatttacaggcctttgtccaattctttcacatacatcactagtcaaagagcaaggaaaagaatcttcttattgcagtagtgacttggtacatgatttgaccttgggctgagagcatgcacagcaatgtaaatgcaggttatatgatcataaagaaaaaaatccatcaagaagccataatagtgatgaatctgcatgcaaatacaacagaacaaatgacaatgttgcagggaatatggcacttccacaaccatgttgggagggtttaatatgtctcctggaagctggcttacagaagcctacatgttataaaggatacagcagaattgacagatacagttaactagtctacttcagtagttgcctgtaaatttctttacctaatataaagtatgtttaaattgtagcaaaataaacataacatttacaatcttaacaattttaagtgtacagttcactattgtttaaatatatttacgttgctgtgcatagaatataatttttaaaggaatgatctgttaattatgaaattaaagtgttaattgtattacagggatattggcaaaacaacacttaaggcatagctggtggggtttgggtgcactgtacttactgaggatgatgtaattggctgctccctaatgtgtaagctctcactccaacatcccctgaaggtctctcccactgcctggctctcatgggtcgccaggctctttcttcacaagaaacctgattccttgatggcaggagctttgagtcttcatcgtgggcctctgtgctgtctctgtgctgaacattgacaggggagagggctggcattagcagggcagccccatcccatggtgctctccagctcccatggagttctagaacagaacaagttctgtggaggatggtgccaggatgggtggcttgagggaatctggaggcaggagcccccagccaagcagtctgtacctccctgagggcagcctcacagcccagagatgtgccaccatctactggcctagggtctgagctggttatgaaaatgacccccacaaagttgtttggaagatgagtggtggctgggtgcagtggctcacacctataattccagcactttgggaggcccacgggggagggtagcttgagctcaggagctcaagaccagcatggacaacattaaaaaaaacccattgctacaaaatagacaaaaattaactgcgcatgctggtgtgtacctgtagtaccagctatttgggaggctcaggcaggaggatcgctagaccccaagagatggagatggaggctgcagtgagccatgatcacaccagtgcactccagcctgggcaaaagagtgagaccctgtctcaaaaaaaaaaaaaaaaaaaaaagatgagtggttactaatacacattgcccccctccttttttttttgtaatttaacattctattttagattcaggagggtacatgtacaggtttgttacatgggtatattgtgtgatgatgaggtttgaggtatgattgatcctatcacccaggtagtgagcatagtacccaatagttaatttttttaaccctcacccccctccctccccaccctactagtttctagtatttatctttagctcccacctataagtgagaatatactgtatgtggttttctgtttctgtattaattcacttagcataatggccactagcttcatccatgttcctgcaagggatataattttgttctttttttatggctgtgtagtattccatggtgtgtatgtaccacgttttctttaccaaatacactgctgatgggcaatttggtttattccatgtctttgctatggtaaatagtgctgcaatgaacagagagtgtatgtgtcttcttggtagaatgatttattttcctttgggtgtatatccagtaatgggattgctgggtggaatggtcattctatttttagttctttgagaaatctccagttgctctccacagtggctgaactaatttacatttccaccaacagtgtgtaagtgttccctttctctgcagcttcaccaacatctgttatttgttgacttttaaatattaatcatagccaatctgaccagtgtgagatagtatctcattttgttttcttttttaacttttattttaggttcaggggtacatggacaggtttgttttatagctaatttgcctgttaaggggtttggtgtacagactgtttcatcacgaaagtaataagcacagtacctgataggtattttttttatcctcactcttccctggccttccaccctccaccctcaactaggcccttattcctttctttgtgttgatgtgtactcagttctcacttataggggagaacatgtagtatttggttttctgtgtctgtgttagtttgcttaggataatggcctccagctccatccatgttgctacaaaggacatgatcttattcttttttatggctgggtagtattatttactttatatgtaccatattgtctttatccagtctactgttcatggacatttaggttgattccctgtctttgctattgtaaatagtgttgtgatgaacatacacgtgcatatatctttatggtttatattcctttgtctgtatacccaataataaggtttctgggttgaatggtaattctgctttgagttctttgagaattcaccaaattgctttccacaatggctgaactaatttacatccctaccggcagtgtataagtgctctcttttctctacaaccttgccaggatctgttttgttttttttttactttttggtaatagccattctgactggtgtgagatggtatctcattgtggttttgatttgcatttctctaatgattagagatgctgagcattttttcatatgcttgttggccacatgtatgtcttctttagataagtgtctcttcatggcctttgcccactttttaatggggttatgcatttttttcttgtaaatttgtttaagttccttatagattttggctattagacctttgtccaatgcatagtttgcaaaaattttctcccattctgtaggctgtgtgtttactctgttgatagtttcttttgtggggcagaagcccttcagtttaattagatccgatttgtcaatttttgcttttgttgcctatgcttttgtgtcttcatcatgaaatctttgctagttcctatgtccagaatggtattgccgacattgtctttcagggtttttatagttttgagttttacatgtaagtctttaatacatcttgagttgatttttgtatatggtgtaaggaaggggtccagattcaatcttccgcatatggctaactagttatcccaacaccttttattgaatagggggtcctttttccattacttgttttttttcaggtttgttgaagatcagatgactggaggtcacacacctgtgtgaccctatttctgcgctctctattctgttccaatggtctatgtgtctgtccttgtactagtactatgctgttttgattactgtagccctgtagcatagtttaacattgggtaacatgatgactccagctttgttctttttgcttaaaattgccttggctattcaggctctgttttggtttcatattaattttaaaatagttttttctagtgctgagaattatgtctttggtagtttgtcgggaatagcattaaatctgtaaattactttgggcagttcggccattttattaatattgattcttcctattcatgagcatggaatatttttccatttgtttgggtcatctctcatttctttgagaattgttttgtagttctcattgtagagatctacaatgtagatcctagctgtattcctaggtattttattctttttatggcaattgtgaatgggattgtgttcctgatttggctcctggcttagctcttgttggtgtatagaaatgctagtgatttttgtacattgattttgtatcctgaaactttgctaaagttgtttatcagctgaaggagcttttggactatgggattgtctagatataaaatcatgtcatctgcaaacagggatggtttgccttcctctcttcctatttggatgccctttatttctttctcttgcctgattgctctggccagaacttcccacactatgttgaataggagtgagagagagggaatccttgtcttatgctggttttcaaggggaatgcttccagcttttgcccattcggtatgatgttggctgtgggtttgtcatatattgcttttattatcttaagctatgttccttcaatcctattttattgagagtttttaacgtgaatggatgttgggttctattgaaagcctcttttgcatatattgagataatcatttgggtttatatattttttgttctgtttatgtgatgaattacatccaccactttgtgtatgttgaatcaaacttgcatcccagggataaagcctacttaagtgtgatggactagctttttgatgtactgccagatttggtttactagtattttgttggggatttttgcatctatgttcatcaaagatattggcctgaagttttccttttttgttgggtttcttccaggttttgttatcagaatgatgctggactcatagaatgagttagggaggaggctctcttcttcaatgttttggaatagtttcggtggaaatggtaccagctcttctttatacatctggtagaattcagctgtgaatctgtttggtcccaggcttttcctcattggtcggctttctttactgactcaagtttggaacttgttattggtctgttcagggattcaatttcttcctggtttgatattgggaggttgtctgtttccaggaatttattcatttcttctaggttttctagtttgtgtacatagaggtgtttgtagtagtcttggagggctttttgtattcctgtggagttgtaggtaatgtcctctttgtcatttctgattgtgtaattcacatctcaatttcattcagtttagctctgattttggttattttttgttttctgctagctttgggattggtttgctcttgtttttctagttcctctaggtgtgatgttagcttgttaatttgacatctttctaactttttgattgggatgtttagtgctataaactttcctcttaacactgctttagctgtgtcccagagattctagtatgttgtatctttgttctcactagtttcaaagaatttcttgacttctgccttaatttcattgtttacccaaaagtcattcaggagcaggttggttaattttcatctaattgtatggttttgagtgatcttagtattgatttctatttttattgcactgtggtttgagagtgtggttggtatgattttggttttttcaatatgttgagaattgttttatggcaattttgtggtcaattttagagtatatccatgtgcagatgagaaaaatgtatgttctggttttttggggtggagaattctgcagatatctgttaggtctatttggttgacagttgagttcaggtcctgaatatctttattagttttctgccttgatgatctgtataatactgtcaaatggattttgaagtctcccactatcattgtgtggttatgtaagtctttttgtatgtctctaataacttgtcttatgaatttgggtgctcctgtgttgggtgcatatatatttaggatagttaggtcttcttgttgaatttaatcttttaacatgatgtaatgcccttctttgtttttttttgaatgttgctgctttaaagtctgttttgtctgaaattagactagtaacccctcctttcttctgatttctgtttgcttgatagatttttctccaaccctttattttcagcctattggtgttattgcatgtgagataggtctctagaagacagcataccattgggtattgcttttttatccaatttgctactctgtgcctttataattggggcatttagcctgttgacattcaaggttaatatttatatgtgtggatgtgatcctgcaattatgttgttagctgtttatcatgcagacttgattgtgtatttgctttacagtgtcaatggcctatgtacttaggtgtgtttttgtggtgtctggtttttctttttctggcatcttgaggtgcaatattaggatgtttatttgagttttttttcttatttgatatagacttttgttgctataaatttccttcttagaaccactttttgctgcattctataagttttggtatgttgtgtttttatttttgtttgtctcaagataatttcaaattttccttttaatttattaatttacccattgattattcagaagcacgtctttaaattttcacattatttgtaaatttaaaaaaaatctttctattattgatttgtagattcataccattgtggtcagaaaggacacttgatatgatttcattcttcttaaatttgaaaatttttttgcctattgtaaaatgtatctggagattgttgtttgtgcaattgaaagtaacgtatattccacttctggtggctggaatgttttgtacatatccgtgaggtcatttggtccagggaatagttaaattataatgtttctttattgttgtctgtctggataatctgctcatagtgggaagtagaatacagaagttccctactcttattgttttgcagtctacttctccctttaaatctattaactcttgaattatatgtttaggtgctcagatagatgtctggtgtatttgcatttataattcttatatactcctaatgaatcagttcttttattataaggatcttctttgtcttatttaagtatttttgacttaaagtttattttatctgatatggtataggtatctctgctctcttttgatttgtttgcatagaatatcttttttcatccctttactttcaacctattcatacacttaaggtaaaatgaatctcttgtaagcagcatagacatggatcttatttgtttatccattcagccattccatgtcttttgattaaagattataatctattcatattcaaggtaaccattgatatgtaaggacttactactgcccttttgataattgttttctggctgttatgtagatttttatcattcttcctctcttgttttcttcctttgtgattagatgattttatgtagtagtacgctttgaatttcttttctttttttttttttttttttgagatagagtctcgctctgtcgcccaggctggaatgcagtggcgtgatctcagctcactgcaagctctgcctcccgggttcatgccattctcctgcctcagcctcccaagtagctgggactacaggtgcccgccaccatgcctggctaattttttgtatttttagtagagacagggtttcaccgtgttagccaggatggtctcgatttcctgacctcgtgatctgtctgccttggcctcccaaagtgctgggattacaggcatgagccatcgtgcctggcttgaatttttacttctaatattttctttatctactataggtttttgctttcggtaccatgaggcttacacaaaatatgttatagttaaaacaggctatgctggaccaacaataacttaacttcaattacactgaaaaactctacactcttctcccaacattttatcattttgatgtcacagtttacatcttttaatatgtatatcccataacacaaggttccccaacccctggactggagactggtactggtccgtggccttttaggaaccaggctacacagcaggaggtgagcagtggctgagcaagcattactacctgagctttgccttctgtaaggtcagcagtggcattagattctcataggagtgtgaactgcacgtgagagggatctaggttacatgctccttatgagaatctaactaatgcctggtgagctggggtggaacaaattcctaccaaaaccatcccgtaccctctaccccccagtccatggaaaaattgtctcctatgaaacaggtccctggtgccaaaaagttggggaccactgccttaacaaatcattgtggctactattatttcaaagagttttgtcctaaaatcttcatacagaagatataagagatttgcaaattaccgttatagtattagagtattctgaatgtcagtatgtacttagtttcactagggagatttttattccctaatgttcttcagcattcctttctctttctttctttctttctttctttctttctttctttctttctttccttctttccttccttccttccttccttccttccttccttccttccttccttccttccttccttctttccttctttccttctttccttctttccttctttccttctttccttctttccttctttccttctttccttctttctttctttctttctttctttctttctttctttctttctttctttctttcttctttctttctttttcttttacagagtcttactcttgttgcccaggctgtagtgcagtggtgtgatctcggctcactgcaacctccacctctgcctcctgcattcaagaaattctcctgcctcagcctccagagtagctgggattacaggcacctgccaacacgccaagttaatttttgtatttcagtactatgttggccaggctggtctcaaactcctgacctcatgatcctcccacctcgccctcccaaaatgctgggattacaggtgtgagccaccatgccaggccagcatttcttttaaagcaggtctagtagtgatgaactgccacagtttaatttgtctgggaaaattcttatttgttcttcatttctgaatgacagatttgttgggtatagtatcatcggtttgcaattaaaaaaattatttcagtttatttaatgtatcattcagatttgtcctggcttttcaggtctctgctgagaaatcagaggataatcttataaagattctcttgtatgtgacaagttgatattttcttgctgctttcaaaattctctttgcctttggcagttgaaaattgtattataatgcattggtaaaagtcacattatatttaatctatttagggttatttgggcttcctgaatctgtatgttaatttatagctccagatttgaaaaattttctgccattatttacttaaagatgtttcctgcctcttctttttctgtattccttctgggacacctgtattgcattcattggtttgcttgatagttttttataattcctgtagaatttatttactctttttgtgcgttttgttttgtttctctcacagggtaatttcaaatgacctggtcttaatctcactgatcctttcttctggttaatcaagtctactgttgaagttatttgaataaatttttcagtttagttcattgtgtctttagctccagaatttgtgtgattcttttttgtggtttctctcttttttgatcttataattttgtctgtgttcacttttactgattttatttatgtatattttgatattctcttgtagctcactgaccattgaaatataattactttgaattttttgtcagacatttgtaaatctccatttttttagggtaacttactggtgctttatttttatggtagtgtcatgtttccctgattgtttgtaatccttatggccatgtgtaggtgactgtgcatttcaagtaggcacttgttccaatatagactgactttgacaggaaaagcccttcaccaatcatcctgtccagaattctgggcaggcatctggtatggtccatggtaagcttgttgctggagttcttgggcaggctcacctggtgcttggttctatagggttgggcctgcagcctgggttcaccaggattgacctgttgattgggtctgcagtgatggttctatagcctttttccatgtggttgggcaggaagttgaattaactgggcaagcctgaatcctggctgacttggcactggggaagtcctgagtctgtgtctgcagtgtccagccaggtgctgggatgggcgtggtgtctgtgatggaactggagcctgagtgtacagattctagcctagccctggggaaatccaagagccagggtccatggctataggtctgggtcctcagttttcagaagctgtcctggagactgagtccacaggggtggttcttgagccttggtccacagggaaagcttgtgcaggagtctactggtgtggttctggacccagggtacactgaaacatgtctggatcttgggtccactggagcctggtgctctggggaccagcctgggtcctggggcagtgtaatgcaggggagtcttataacctgggtctgcaaggtctggtctggtgcatagggctacagaagccaggctgaaggctggatgtgtgcatgctgacctggaggctagattcatgaggactggcttggagcttgggacacagggcctggttcagatctgttgtcatcctgaaggctgaatgtgtgggtacaggcctgggtcctgggactgtgtgggctggcctggaacctgggtgtgcaagggaaatcctagaacctgggtttgcagaggctggactggcagtggaaacttttgagataggcctgatctttgggtttactggagcacaggatcacaggggatggtcttgagtatatgcaggcttgtatgctcagtcttctggtgctgacctgaattcaagggttttagaaactggacaggtgctgggttagacctgaaggctggctctgaggagccagcctggagcctgtatctgtaggagctagcctagtgctgggattggcctgaaatctgggaccacaatagctgtctttgtgttggggtggggctgtagccttggaccatggtgccagcctgaaggctggggtcctgtgggactgcctggcactggttttactgtggtaggtgcagtgttgaggtctgaggcaaagttcaatactccctctccttccttcaagtaggggatgtttctgtccacagtgtatagcctggagtgagaggaaaggtgatgtgggttgtataaaactctccttactgcactcttcaatgttttagtcttatttctgtgctacccaagtgttgcaatctgacacttggtttgatgagctcctgtgaggatattttatgtatagttaggttcaaattgaggtatttgagaagggatgaatgtggaaagtttctattctgccaccttattgacatcactccaaggatttttattataataaacattgtgaaaatgtcctatgtaatttaacttgaaaagtgggcaatttaattcctatattcctgaaggttttcattctacctaggctggttcagaagttaagcagttagttaatcctctgctaagtctgaagccctctcactcccttcctacctctcccatgcatctgcacatcccatactgggaaatccctctcctctgggagaaagtatcttggtcttgatttgtttcttaaacaaatcctataccttcatatcttatataacttccatcctacttgatgctgttctttcatgtttcttatgttgttatccaggttcatgaacccctggggatttgcgagaatgcagacttattttccaaaggcggggaggccctgaggttcaacatttctaagagattttccaaagatgctgctgcctcacacatcaggaccattttacgagggtgagcctagaagtctttcttctgcccaccaacatgctgaggatcaggaaaggcatgtgagccactcttcaagagaagaggccacaagaccaggggagcccaacaccatgtctgagcttatccaggcacatgaggtgcctgagaggagatagtcattgcacctctggccacgtgggttattggccgtgatccctgagacagcagctcagatgtaccacttgtgccacctggagctggctcaggagtccatctacccagatcctacttgtctgccctggtgagaataactccatcaaacacccagccccttttatcgagaactacagcacacaaagtttcttaaaatgctgatgtttaatgatctacactacatgattaggctcaagatgtgtggattttctaaaacactgatctgagatctcaaacacatgcaaaataggataacaaacaagtccaaagctgctcagccactgaagagtcctcaggagagtagtgctgatgtccacggaatgtgggagcagcacatggacaagcctgtgagtgggtttcactcagtggaatccctccaagcaggtcttgttcaggaggctgaactgagtcatccagggcctggtgctgatggtgaagaagcaggtgaaagtctgagagaacaagcacaggaagggacagtgggtgagggaggctcaggaagctcatggctcaagctctgaacaatggcttcctctccacattgccctttcccaggtcaagcagtgggaagacggggcctctggctatcatgtgctgcccccaagcctgagtcctgggctgttctggagatttgagctgaactgcaactcttttctgacccaggggcgcctgtgcaatgttccccactccctagcagtggccctcaggggaaccccgggctgtcctggtgtgatccctgcacccaagagcagcaggagaatgcattgtcccagtggaagcagttcccagatttaagcaatcagctacctattttttaatattacaataagggtgttgattaagcataggaagagttttcccagagccaggctttacttggagcttgtcccctagagcaggtgctgcagctcagctcagggcctgggagggagggtagtggggctccttctcagcctctaccacttttgggtctaggggagggtaaggaaaccctgagaactgcatccacagacagaggtgatgtcagatcccaggttcttccagaaggcaggggaggaagaccagagaggggaccacttcttactggacccaggagactgggaccccagggggaaagagcagtctgaaggccatgtgccctgggtgcaggcagctgcagtggcatgacagggcagagttgataaactcagattggccaggagcctgcaagtggacccctagctgcctgcccctctgcgctccccactaaggcacaagcagggcagcctggtagaggctgctgcaggctcactcctctaagtctctttgtcagttgcacctgtgcccacaccacaccccatgtggcatccacagctgtatccaggagggaagctggtgtcctgtcttacattgttcagctctgtgctttcttggaaatggcagttgtcaatgtcgtcttcaaatttcccacacctagttctccccagcagtagctccattgagaatacagtcttggactccacctattgcacacagagagattaatgtgaacacaccctccttgttgcccctaagtagctgctggtgaagatgtcatttgtgtaggagaagtcccaacattctcctccattagggagcttgcccatgggcctggcatcaggagatcttctttagattgggcagttaagaacaaaaagcggatgggcatggtggccccagggcagacacccatgaatgtatccctatttccagatgcacttcccactctcccatggtgagaccccagtttcactctcagtcagtgtctgaacctgcagctgcatttccagaggatggcgctatgtgcctggggaggggtttggctctccaagagctttcagggtaacctcagccctgggacagagggagcctcatctagggcatgttgtcaaaccttccacctgacctgaggaaaaaaaaaatgcaagaatgccacccagcactcccactacacacaggcatacatccttgggacaatggcttcaagaaacaccatctggggccgggtgtggtggctcacacctgtaatcccagcacttttggaggctggggtgggtgaataatgaggtcgggagttcgagaccagcctggccaacatggtgaaaacccatctctactaaaaatacaaaagttagctgggcatggtggcaggtgcttgtaatcccagctactcgggagggaggctgaggcaggagaattgtttgaacccgggaggcagaggttgcagggagctgagattgtgccattgcactccagcctggttgacagggtgagactccatatcaaaagaaagaaagaaagaaagaaacaccatctgccctattgcaaagtgcaccttgatcttctcactcctttcagtttcacttcattccatctcctttctccctatccgtccatttccccaactccaaaactgactctggaattgtcacatccaggaacccacgtggcaggctccagcccagagagcaggggtcagagaaccagccagggccttgcacagggtctttccagaggctgaagcttggtgcagggttggggtccttttgctcttcttgcaaggtttcagtaatgaggtaggaagagcatttttgcctctctacccaactagaagtcctcaacttagctgggtgcagtggctcatgcctgtaatcccagcactttgggaggccgaggtgggcagatcatgaggtcaggagttcaagaccagcctggccaacatagtgaaaccctgtctctactaaaaatacaaaaaattaaccaggcatctggcgggtgcctgtaatcccagttatttgggaggctgaggcaggagaatcacttgaacctgggaggcggatcttgcagtgagcggagatgacgccactgtactctagcctgggtgacagagcaagattccatctcaaaaaaaaaaaaaaaaaaaagtcctcaacttggtgactattttcattgttcatgcctacagcacagatgaactgtgcattcctgattgcattctgtagtgacttcattaaaaggagaacatttaggattaagacctgtggtctgaggaagagtgtgaaacagtcttcagtttattaagtgcagacacaccaaggagctcagagaagttggaaatcagcaaagaggaactgaccacccagaggtcttttgggactggtgggggtttcttattgctcctgaacccttactgttctcttttttaattttcattttttaaattatctcttttttattacattttttggaagtatttctcaatttctctctattcacattttctgttcagcccttttccttattccgtatcttcattttcttggtagtcctcattttgaagtcattcttcagttaaataatgtcataaaaagatggagattaaacaatatgtttttcatgagagttgattaggatcaaattatttgaaatttctaacttagatgttttcaaaatcaaaaactaactaaactaccttgtattttcttaagtatggactacaactggtgaacaagactcttcaataagaccccctgtccccaccccactcccatttttcactgagcagcacatgccagatgccagggcaggagggtacgtggtcaccaacctgctccttccaggaattcaagatgtgccccagtctgtaggcatagtagtccttgctctgttggttgaatgtgtggacagcaaactccactgtggcagggaggtaacgagccatgacattgtgttcatcacagtccctttgctcgtggaaatgccaggcatagatcagcaggatctgggagcctaagagaagcagcagcagcgcccaggacagacctcccttccacggcaggcccagcatggtgctgactgtaggcaccgctgactttgctcttcccagcccccgtgcccacaggagttaattgagcacagacccagcccttaatcttatctgctcagacagccctgtgggacaaacttgtctcaccccacactggcaacaggcactcctacaggacaggaaggacaggatcctggattaaagggaggcagctctggatgtggagtcactcatctgccatccttctgccctatactctctaggccagcacaagccacaggcaggaggggagctaccctctgccactagctttgaaggctgctccttcagaacccacaggttctggttgtcctcaggtgcttggtgtccttggatgattctgtgccttcgcctcccacagcgaactgagataagacctggggacatctcgactctcactctcccctccttcaccccgtcgaagagaggatctccgttgttcagaaaaataactaagatatcagtttgttcttttgttgtataatacctcaacagttgtactctgtgaaccaagggaaaaaatgaaaaaaataaatggcaatttttatcaaccattttgacctgggatggacaatgagtattgtgagaaaagggcaggaaagacagagacccaagtcctgaggccccagcctggtcatgcccagcccagccctgcttgcatttctaaaccttgtcagccctggttccagctgagccagagccaaggtttctacagggcccaccgccctacatctgcagccccaccacacacactcatgttttattagactggaatatcattctagaccaaatttttaaacacttctctgggagatcacatgtttctgcctcagtgagatagaggttggaccattcttcagccccttgatcatttttgtctccatctgaccatccttcttggtgttctagagtgagctattttgccagcacttaggtgatactaggtggttacttttaaatcaatttcctggcaataactaacctgaaagaggaaataataatattttgttgctgtaagaatgaacattaaatagtgcaggacaggtgaagtatgcaaaagtgagagctttgagtttggctgagaagactatggtgctgcaatataggcaagaacctagcattgttgccagataacagaatagaaagttcagtcccaagtcagggagactgattctacaagaactgttctgactgtgtcccataccatgttcccagatcacagcagggccaggcctgggaagagcatcactgcatctgtccacactagcacagcactggccaggtcaagacagctgcaggtgaagagagtcatgctgcctgacccaacactggggtggtcccgagtgtctcctcacaggagacttcacccatcacagacagaagaaagtagctagtgtgtggggagctgctgcccaggagccatgtgcatcttgatcttctgccttgactccaggaagtgggtgacacagagtagctgaaacctgtgtcctgattagcaatgataacaggtgaaatctggcccattgcgttgtttcatgggttgtttttttttttttttttgacggaatctctgttgcccaggcttgagtgcggtggtgtgatcttggctcactgctgcaacctccgcctcccaggttcaagagattctcctgcctcagcctcctgagtagctgagattacaggcgtgttgcaccatgcccggctaattctttgtgtttttagtagagatggggttttgccatgtaggccaagctggtctcgaactttcctggcctcaagtggtcctcccacctcagcctcctaatgtgctgggattacaggcatgagctactgtgtccagcccccattgcactgtcgaaatgtcactggtcttctggatcacacccagctgacccattcttctcatatttatttaaccttggcaaacaaacagctcaaccacacaactatttgcaaaattatttgtgagatctactgggttgtgaaagattttcacatgagaaagattttcaatcaaacacaactcacaagtcaagggatccatgacacaagattcacactttccttttcacttggcaaagtcttgcttataattgtgaagcagaagccagcactgcaggattccttaccactgcatgagttacacaagaatgaaaacttctcatgggttccctaaaaactgagattggaaaatgacataataacaacaaaaataatggtgcaaattgacatagttatatctcatagatgtgtcttaggtcttttcaaagacaagagataggtcaagaaagacctgaggtgaccctgagcttgcatctctgcctgacttccaatctcagcacaagcaaggaaccttggctaggacagaggtgtgagtggcctacgcattgaaggtgtgccccaatacacacaccaagtgggctagttttggaagggtgttgttgttgttgttacagttgtttagtgactttgaccacatgtaacaagtaacacactcttcacagaaatagtttagaaaagtcactaaacaaagacacaactacaatccacagcaagcaacaacaaatcttagggagaaagcagactcagactcctggagttaacacaatttaatatttaaataaccagttttccaaaaaaaattataaggcatacaaagggacctgaaagtaagccccatttacagttttctttgtggtgcaatgccttttcagcttgatgtaatcctgtttgtttatttttgtttttgttgccatgattttgagttcttacctaaaaagtctgcccacaccaatgtcctgaaatgttttcccaatacttctagaagtttcatagtttcagatcttaaatttaagcgtttaatcaatttttgttttttttatatatatagtgttttatatatatagtgttttttttaatgtatatatagtgagaggtagtggtctagcttcacttttccgcattatgatcatccagtttttccagcagcatttattgaagagactgttccttttccaatgggttttcttggcgtctttgttgaaaatgaggtggctgtgaacatgtggatttatttttgggttctccattctgttccattggtgtatgtgtctgtttttatgccagtgccatgctgttcggttactgtatcattgtactacaatttgaagtcaggtatattttgatgtcccccgccttgttatttttgctaaggatttccctggctatttgaggtcttttgtggtattatacatattttcggatattttttttgtccttttctgtgaagaatgtcattgacattttgaataaggattgcattgaaattgtagatagctttggttagtattgacattttaacaacattaattcttccaatttatgagcataaatatctttccagtttttaatttcctcttccgtttatttcattaatgctttatagtttttttgtagacatcttttacttcttgaggtaaatttatttctaattattttatatttttgtagctactgtaaatttgattgcattcttgatttctttttcagtttgttcactgttggtgtatgttagtgctactgatctttgtacattgattttgtgttttcaacttaactgaattcatttagcagttttaatagttttttgacaaagtctttagcttttcccaaatatcataacatgtcatctgtgaacaaggataatttaacttcttcctttccaatgtggatgcccattatttctttctcttgcccagttgctctggtcgggactttgagtactacattgaataaaagtggtggaagtcttgttccagatattaaaggaaagaaatatataacaaacccacagcctttattttggccttcattttgaggtatgttcctttaagcctgttgtgttgagagcttttatcatgaaaagatgtatgatttttgtctaatgttttttcagcatctattgaaatgaccatatggtttttgtctttgattttgttaatgtgatgtgtcatatttactaatttgcatatgttgacccatccttgcatccctggagtggatcccatttggtgatggtgaatgattttttttacgtgttgttgtattttcatttgctagtactttgttgaggattttttttctttttttttttttgctcctatgttcaccaggggtattggcctgtaggtttttattgttttattgtaccctgaactggttttggcgtcagagtaatgttggctttgtagaatgagtttggaagtattctgttcttttttattttctgaaatagtttgaatagaattgatagtacttctttacatgtttggtagaattcagcagtgaagctattaggacctaggctttctttgatgggagactttttagtactgctttgatcttcttactcattgctgatctgtttaggttttctgttttttcttggttcttcttggtatgttatatgtatccaggaatgtattcacttcccctaggttttttgccatatatttgttcctaatagtctctaacaatcctttacatttttgtattatcaattgttatgtctctgtttttgtttctgattatatttttttgagcattctctcttttttccttactctagataaaggtttgctgattttatcttttcaaaagaataacttattgttttgttagtcttttatattttttaaattctcaattctgatatttgttacttctttccttctactaattttggatttggtttatttctgcttttctaatttcttgagctgcattattaggttgaaatatttgaaatcttaatacatttttggtataggcatttattgttataaacttgcctcttagaactcccttagctgtagattttgatatgttgtgtttccattttaatttgttttaagtaatttttaaacttctgtattaatttctttattgatcaatgatcctttagaaatgttgcttaacttccatgtgtttatataatttccaaagttcctcttgttattgatttctagttttattccattgtggtcagaaaaggcacttgatatgatttcaactttttgaaatttattgagattttttttgaggcctaacatatggcctatcctggagaatgtttcatgtgctgataagaatgtgtattctgtagcagttggattaaatgttctctaaacatcaattaggtctacttggtactctagagtgtcttttaactttgaatatttttgttgattctgtctggctcatctttctgattttttctggctcatctttcatcttactgaaaggggtattaaagttctctactattattttattgtagtctatctctgtggctttatatctattaatgtttgcattatatgcttgggatatccaatgctggaagcatagatatttatagttgttattccttttgttgaattcacccctttatctttatatagtaaactcctttttctcttttttacagtctttgacttaaaatatattttatcttgtgtaagcttagctacttctgctctttttttttttttttttttttttttttttgagatggagtctcactctgtcgcccaggctggagtgcagtggagcaatcttagctcactgcaaactctgcctcccaggttcatgccattctcctgcctcagcctcctgagtagctgggactacaggcacctgccaccacacctggctatttttttgtatttctagtagagacggggtttcaccatgttatccgggatggtcttgatcttctgacctcgtgatccacccacctcagcctcccagagtgctgggattacgggtgtgagccaccatgcccagccctacttctgctctttttatggttttcatttgtgtggaagatctttttccatcccttcactttcagactgtgtccttacaggtgaaatgagtttcttgtaggcaaaatatagttgggtctttatcctttatccattcagtcactctatatcttttagttgaataagttagtctacttacatttaatgttattattgacaggtatggacttactgctgcaaatttattatgtgtttttcattgttttgtaactcctctctttcattctttcttactgtattcacttgtggttaagtaatttcctctcgtagtatcttttcatttgttgctttttattcttagtgtatctattgtaggtttctgctttgtggttaccttgaggattccaaaagattctcttatacatataacaagttactttaaacagatgagaacttaactttgatcacaaagaaaagaaaagaaacaaaggaaagactaaaaactctacaatttaactccatcaactccccgttttgactttttgttgtcttaatttatatcttttttattgcctatctcttaacaggttgctgtaataatttttgatagatttatcttttttttcctcataccagatatatgagtagattactcagcacaattacagtattaaaatactctgaattgtctatatatttacttttaccagtgagttttatatctccaatagctttctttttgcatgttatcatcctttctcttcagatcaaatacatcaatttagcatttcttttaagatgggtctaatggttaaggattttctcaacttttgtttgggaaatgctttatctcttcttcatgtttgaaggaaatatttgctgattacagtatttttatttggcagttatttcccttcagccctttgaatatgtaatcccacttcctcctggcctgtatggtttttgctgagaagtctgttgccagacaaattggagctcctttatggtttttttttcctttcttcttttattttgctgtttctagaatcctctctttgtccttgacatttgagtatttgattattatatgctttgagatgtgtcatttgggtcaaatctgtttggtgatctgaccttctttaacctggatatttatctttcccttgatttggaaaaatgtctgttatgatttcttgttttaaaaattttatttcaatagtttttggggaacaggtggttttggtttacatggataagttctttattggtgatttctgagatgttgctgtacccatcacccaagcagtgtaccctgtacccagtgtgtagtcttttatccttcaccctcctctcacccttcccccaacttcccaaagtcccttatattattcttatgcctttgcatcctcatagcttagctcccacttataaatgagaacatgtgatacttggttttccgttcctgagttacttaacttagaataacagtctccaattttatccaggttgctgcaaataccattatttcattcctttttatggctgagtagtaattcaaggtctatatgtaccacattttctttttccactaattggctgatggacatttaggcttcttagatattttttgcaattgtgaattgtgctgctacaaacatgcatatgcaagtctctttttcatataatgacttcctttcctctgtgttgacactcaggagtggaattgctggatcaaatggtagttctacttttagctctttaagaaatcttcatactgtttttcatagtagttttactagtttacattctaaccagcagtgtaaaggtggtcccttttcactgcatccatgccaacatctattttttttttattttttaattttgcccatccttgcagatgtaaggtggtatcatactgtagttttgatttgcatttctctgataattagtgatattgagcatttttttcatatgtttattggccatttgtatatcttcttttgagaattgtctattcatgtcctttgaccactttttgatggggttttttgcttttgtcttgctgatttgtttgagttcttcatagattctggatattagttctttatcagatgcacagtttgtgaacattttctcccagtctgtgggttttctatttattctgctaattatttcttttgctgtgcagaagcttgttagtttaatttagtttaattaggtcccatctatttatttttgtttctgttgcatttgcatttaggttcttggtcatgaactctttgcctaagccaatgtctagaagaatttttccagtgttatcttctggaatttttatggtttcaagtcttagatttcagtctttgaactatctagagttgatttttgtataaggtgagagatgaggatcctgtttcattcttctacatgtggcttgccaattatcccagcaccatttcctgaatagggtgtactttatctactttatatatattttgtgtatataaagtaaaaacctttgtcaaaaattagttggctgtaagtatttggctttatttctgagttcactattcacttccattggtctacgtgcctatttttatatgagtaccatgccattttggtaactatagccttgtagtataacttgaagttgggtaatgtgatgctgccagattctttctttttgcttagtcttgctttggctatgtggcctcttttttggttccatatgcatgttacaattttttttgtagttctatgaagaatgatgatggtgttttggtgggaactacattgaatccgtagattgcttttaacagtatgatcattttcataatattgattctacccttccatgagcatgggatgtgtttccacttgtctgtgtcatcaatgatttctttcagtagtgttttgcattttttcttgtagagttctttcacttccttggctgggtatattcataagtattttatatttttgcaactgttataaaagggatagaattcattatttgattctaagcatggtctttcttggtgtatagcaatgctactgatttgtgtacaatgattttctgtcttggaactttaccaaatttatcacatctagggtctttttagatgaatctttagagttttccagatatacagtcatataatcagtgaacagcaacaatttgacttcctctttaccaatttggatgccctttacttgtttctcttgtctgattgctttggctaggacttccaatactatgttgaatagaagtgatataagtgggcatccttgtcttgttccagttctcaggggaaatgctccccttaagcaacggggaagcatttctcaacttttccccattcagtataatgttgactgtgggtttgtgatagatagttctcattaccttgtcccttctaggccgattgtgctgagggctttaatcataaaaagatggtgaattttgtcaaatgtgtttttctgcatctattgagatgatcatatgattttcatttgtaattctgtttatgtggtgtatcacatttattgacttgtgtatgttaaatcatccctgcatccctggtatttctttgtagagatctttcacctatagaacctcctcatagcataaatatggaactaaggagtggtaaccggcttattatgggtattatcttttttaaatgccactggatttggatttggttagctagtattttgttgaggatttttgcaactctgttcatcagagatattggtctgtagttttgtttttttgttatgtcctttcctggttttggtattagggtgatactggctttacagaatgatttaggaaggtttgccactttctctttcttttggaatagtttccgtaagattggtaccaattattctttgaatgtctgatagagttcagctgtgaatccatctggtcctgaatttttttttcattggcaattattttcattactgtttcaatctcgctacttgttattggtctgttcaaagtttccatttcttcctgatttaatctaggaggattgtatgtttccgggaatttatccatctcctctagattttgtagtttgtgtgcataaaggtgttcatattagccttgaatgatcttttgtatttctgtatagtggttgtaatagctctcattttatttctaattgagctttttggaccttctcatcttttcttggttaatgtcattaatggctcatcaattttatcttttcaaacaagcagctttttgcatcatttatcttttgtattttttgtttgcttcaatttcatttagttctgctctgatctttgttatttattttattcttctgggtttgggtttggtttgttcttgtttctctatttccttgaggtgtgaccttagattgtttatttgttctctttcagactttttgatgtaggcatttaatggtatgaactttccttttagcaccacttttgctgtatcccagaggttttgataagttgtgtcactattattcagttcaaagaatcttaaaatttccatcttggtttcatcatttacctaatgaagtgcagattatttaatttccatatatttttatagttttgagagtttcttttggatttactttccagttatattccactgtgatctgagaggacacttgatataattttgattttctcaaatttattaagacttgttctgtgacctagcatgtgttctgtcttggagaatgttccatgtgctgatgaagagaatgtatattatgaagtttttgggtagagtgttctgttaaaatctgttaggttcatttgttggaaggtatagtttaagcccattttctctttgttgactttctggcttgatgacctgtctagtgctgtcagtggagtactggagttccccactgttattgtgttgctatctcatttcttaggtctagcagtaattgtttgataatttgggaactcccatgttagatgcatatatatttaggattgtgatattttcctattggattaatccttttatcattatataatgtccttctttgccttttttcacgattcttgctttcaagtctgttttgtttggtacaagctattcctgctcgcttttggttttcatttgcatgtaatatcttcttccacccctttaccttaagtttgtttaagtccttatgtgttaggtgagtctcttgaagacagcaggtactcggttggtggatttttattcattctgccattctgtatcttttaagtggaacatttagttcattcacattcagtgttggtattgagatgggaggtcctgttctgttcattatgctagttattgcctaagtaccttgatttttttattgtgttattgctttataggccctctgagatttatgctataatcaggttctattttggtgtatttcaagtttttctttcaagatttagaataccttttagcatttcttgtagtactggcttggtagtggcaaattctctcagcatttgtttatgcaaaaaagattttatttctccttcatttgtgaagcttagttttttggatacaaaattcttggctgacaattattttgtttcaggaggctaaagataggaccccagtgccttctggcatgtaaggtttctgctgagaaatctactgttaatctgataggttttcctttattggttacctgatggctttttgtcacagttcttaagattatttccttcatcttgactttatataacctgatgactatgtgctaggtgataatctttttgtgatgatttttttcaggtgttattttatcttcttgtatttggatgtctagatctctagcaagggcaggtaagtttttttcacatagtctctcaaataagttttctagacttttagatttctcctcctcttcaggaacaccagtagtttttaggtttggccacttaatataatccaaagtttcttgaagccttgttctttaattttttttttgtccttgtctgattgggttaatttgaaagctctgtctttgagctcttaagttctttttattttttatttatatatattttgtattttttccataagttattggggtacaggtgatatctggttacatgagtaagttctttagtggtgatttgtgagatattggtgtacccatcacctgagcagtaaacactgcaccatatttgcagtgttttacccctcatccccttctcactcttccccccaagtctccaaagtccattgtatcattcttatgcctttgtgtcctcatagctgagctcccacatgtccgtgagaacatacgatgttgggttttccattcctgagttactttacttagaataaatagtctccaatctcatccaggtcactgcaaatgctgttaattcagtcttttttatcgctgagtaatattctattgcatatatataccacagtttctttatccacttattgattgatgggcatttgggttggttccactattttgtaattgtgcattgtgctgctataaacatgcgtgtgcaagtatcttttttgaataatgaatttcctaggtgttatttgtgcttcttgtatttggatgtctaggtttctaggaaggccagggaagtttttctcaattattccccaaaatatgttttccaagtttttagaattctcttcttcctcaggaacatcaattattcttaggtttggtcatttaacattatcccagacttcttggagtgtttgtttatattttcttattcttttgtctgtgtctttgttggattgggttaattctaagaccttttcttcgagctctgaatttctttttcctactagtttaattttgttgatgagactttccagagcatttcacatttctaagagggtgtccaaagtttccaaaatcttttattgttttttctttaaactatctattttcttgaatatttctcccttgacttcttgtattgttttttggatttccttgcattgggcttctcttttctctggtgcctttccaattagcttaataactgaattccagaattctttttcagataaatcatgtatttcttcttagtttggatccattgctggtgaactagtgtgattttagggggagtgttaaagagccttgttttgtcatattaccagggttggttttctgatttcttctcatttgggtaggctctatcagagggaaggtctagggttgatggctgttgtccagattattttgtcccacagggtgttcacttgatgtagccctcccctcttttcccataaaagagggaagtgtttgttcctgtgagccgaaatgcagtgtttgttgtctctcttctaggtctagccacccagcgagtctaccaagctctgggctggtactggggttgtctacacagagtcctgtgatgtgaactgtctatgggtctttcagccgtggatatcatcacctgctctggtagaagtggtgggggtgggggtacattggactctgtgagggttgttagatttagtggtttaatgctctatttttgtgctgattggccatctgcagagaggtggcgctttccagaaagcatcagctatagtagtgtggagagggaccagcggtgggcagggccctagaactcccaagagtataggccctttgtcttcctccaccagggtgggtagggaagggccatcaggtgggggcggggctaggcgtgtctgcgctcagactgtccttgggcgggtcttgctgcggctgctgttggggatggaggttagactcccaggtcactggagttgtgtacctaggaggattattggctgcctttgctgagtcatgcaggttgtcagggaagtgggggaaagccggcagtcacaggcctcacccagctcccacgcaaactgaagggctggtctcactcccactgtaacccccacaatagccccaagtctgtttctaggtggtgggcaaaatgagcttgagaacttgccccaggctactcacctccaggctgtgaaagaaaagggcttggttcttcccttgcctgtggagtctacacaccggatttgcaccctttcctgagttctggccaggaggcttctcacccattcaaattgttacacagttcagctagagatttccttcttcctatggagtcttgccccaccactcttctggcagtcttcccagtggatccctgtggtgtcaggcaggaatgtcctacttggggggcccaacaagctcccagggtctttctgctgcttcctctacccctgtatttcactctgctctctaaattgactcagccccaggtaaggtaggaaacttatctcaccaacagaccttcagtttctccattgggggtgtgagttcaagagaggagggtttccctttcccacttttgcagttggagcactcatagtatttgaggtgtctcctgggtcctgcaggagcaatttgcttctttgagagggtctgtggatcctcttgggattgctggattgttcttgcagtcaatctggagctagaattcacagcgtgagcttccacacgctgctctgttcagagctgtaatctagtcctgtctcctgtctgccatgatgatccatcacagattttgttttagctgtttaaataaatttattaggtttataagtaacaatatggatagatctcaaaatcaggatttggtttttcttatttatttattatgctttacgtcctgtgatacacgtgcagaacatacagttttgttacacagatatacatgtaccatggtggtttgctgcacccatcaactcgtcatctaggttttaaaccctgcatgcattaggtatttgtcctaatgttctccctccccttgccccccaccccctgactggccctggtgtgtgatgttcctctccctgtgtccatgtgttctcattgttcaattcctacttgtgaatgagaacatgtgccacaaccaacttttttactgttgagttttgagagtttattacatatactagatactagttgtctgatggatatatgatttgcaaatattttctcccactctgtagtttgtctttccatcctcctcacatgggttttcactgagcaaaagcttttaattttgataagaaataatttatcagtttattattttatgtatcatgattggaggtttagtctaaaatgtattttctgtgcatggtgttttcatatgcatattaatttatattctatgtctctagaggtctgccctttttcattactaatatttttatttctttatctctttttcctttcctctctcttctttcctgactctgccaaaaaacacaagaacaatgtagaccaaatactcatggctgaatacttccctgccatggtggaatgtgtgtgtcacacacattccacctgcagagcatggactcatatgcctacaagctggtgcatgttctgagttcctagaggaagaaggttggtaaccacatcctttccttcccagccctcccttacttgctaccaataatggataggggtgtggtgtctaattaaggagtcctggtttatcatttgtagtccataacaaggtaaaatttgaggtctatagtatagtaaggtataatatctagtttagtaattttaagtttttagaaaacattttactttgaaacatctaagaacttattcaaatctaattaatagtgcttaaaacattttttcaatcttcatcttttctatgacattcaactgaagaatgacttcaaaataaggactactaaagagatgaagctactgagttaaaaaaaatatatggactaaaaatgtccataaagacagattgagaagtacttcaaattttatgtcaaagacataaaatgacaacagatacttagaaaaatgggaaaactggagacagagtgagagagagagtgagagatgcagattcagaagcaataaggaacccccatcagtcctgagaggctgctgtgcggtcagttcctcttctctgatttccacctgctctgagctccttggtgggtctgcacttaatgaactgaagggttttttacactctttctcagaccacagctttcaatcctaaatgattttcttttaatcaagtcactacagaatgcaatcaggaatgcactgtttatctgggctgcaggtatggacaatgaaaatgatctcccaatggagcacttttggttaggagggagaagtcggattgctcttcctccttcagcactaagatcctgcaagaagggcagagggactccaaccctgcacagagcttaagcctctggaaagactctgtgcaatgccctggctggttctctgccccctgctctctgggctggagccttccacgtggcttcctgaatctggcagtccctgagtcagtgtggggtttgataagaatgtatgaatgaggaaggaggatatggaatggaaagaaatagaattgagtggaaagaagagcaaggaaaatttcaaagtgcattttgcaatggggcagatgttatttcttgaagccattgtcccaaggatgtgtgcctgtgtgtaatgggagcactgtgtgtcatttttcttgctggaggtcaggtgaaagttttgacaatatgctgtagatgaggctccctctgtcccagggctgaggttaccctgaaaactcttggagatccaacaccctcccgggcatgtggcgccatcctctgggaatgcagttgcaggatcagatgcctgctgagagtgaagctgtgtctcatcgtgggagaggtggaggtgaagctggagacaggggatacattagtggggtctgactcagcctgtgtctgccccaggacccaccatacacacctgctctttgctcttaattccttaatctggagaaggttccccagattttacctccagtgaactgatgccaggcccatgagtgagctccctaatgcagtagcatgtttgggcctctccctacaatgacagcatcttcactttcaggtatttaggtgcagaaagaggggcgtgttcactgtaatctctctgtacattagatagagtccaagaccgtattctcaatggagctactgctggggagaactaggtgtgggaaatttgaagacaacattgataactgccctttccaagaaagcacagagctgaacgatgtaagacagggcaacatcttccctcctggacacagctgtggatgccacatagggtgtggtatgggcacaggtgcagctgacaaagagacttagaggagttagcctgcagcagcctctaccaggctgccctgcttttgccttagtggggagtgcagaggggaaggcagccacgggtccacttgtaggctcccggccaatctgagtttcctgactctgccctgtcatgccactgcagtggcctgtacccagggcacatggccttcagactgctcttgtccgcctggggtcccagtctcctaagcctgagtagaggctgtttcctctctggtcttcctccccagtcttcgtctgccttctgaagaaagagcgtggtggggatccaatatcacctctttctgagtgtgcagttctcagggtccccctcccctaatccagagcctgaggcaggtggaggctgaggagggaccccactgccctccctccctcgtcctgccctggcccctgctgagctgtaatgcctgctccagaggatagggacaggggacaaggggaagcccagctctggggacagcctacctaggacaggtgggccccctcatcaaaggattaactaataggttaaacattggcctacatctgagagcagctctggggagacaaagtgacttttgtgctcttgggggtatgaatcacacaggccagcctgtggagtcccaggaggccactgtctgggaagtgggtcctaacacaggttaccttgagtgaagagggagccccagatctggaagcagctaagaaatgtcccaggagtggggctggatggccccacatgaggatgagagccgcattcaactgacagcttgggaaatgtgcaaggtggatattgatcctttgctcagagtgggagccatgagcttcctgagccccctgtccccagtgcctcgcccatgctttccctcccagatgctcacctgcttcttcacttttaggacccagccctgggtaatgcagtgtgagctcctgaacaagacctgctcagaggggttcccctgattgcttctcacccacaggcccaggctcaggctgccctcacctctgtggacactggcagttctccaaaggtggctctgctgtagctgaccagctccatatttgtttgttcttttcaatttacaattcccttggattcatgacggggcatgcagatgctgtcaaagtaaattccacacttctccaggttcctcatgtagaatataggtcattaaacatcagcatttccagaagctttgtgtgctagtgtcctggagagaggggcctgggcagttgatggagttattctcagcagggcagcctcgtgggctctcaggggtaagtttttattccctgttgggcctcctgagtggcttccagaggcacagctaaggtgcgtctgagccgccatctcagggccccttgcaggctgcagaggggcagtgagggtggcctcccagcgcacgggatgtgcacatggagcaggacagggactcgggaatcccacacagcccatgtgacatttgcactaatgctcagagtgcatgtatacctaatgtgttagctgagaatagccagcagctgtggacaccctgtccacatctcccagatcaggcttcggcatgcattctctgtaaaaatttaaggagtaactattttggtctttgtaggcttatagtcactttctcagctacccagcactgcctttgtatgttgaaagaagcatagacagtgcataaacaaataagagcagtcgtgtcccaacaagactttgtctacacatggagacaagcagactgggctgcttttggccctcgggtcatggttgccaacccctgacctaacaggccttctgagtgcagctgccgctggtatcccaagtaccagtacatgggtagctcccaactcatgcacctgcgacgtgcccagattggctagtggctttctccgtgtaattggagctcctccagcagagcaggtacacccctgtggtgtgggaaaggtcaagtctgagagtcacactccttcttcaggagggaggcaggtgaatgtcccagtctcccagcctctgggcatccaattcagaggtgcatgtcacatggttctcagagctccccagcagaataaacacccccggccccagtgtgacccattgataacagacaccttgcgtttccccttctctgtctccctttctcacatgtgtcccctgggatcacctccaaataaactacctgcacccaccagtctgtgtttcagggtcagcctggggggacccaacacaagacctgtggtgcgtttggaccatcgtcttgggacttgtcctccatagatgtgctgggagggtggcccctcgatcataggcgttcaggcaaagcagaggggagagccaggcctggagacctccctgcggcctgccagcactgaggtaggcacagctgctgcactttgtcccatctggcctctggaacccacacagccctgccgtgccttgctccagacttgagcagattttcctctgagaccctcccaccacctcccctgtctgctcccacccttggtccttctcttgaccctgactccatcagcagaaggaagctcagaggaggtgctttatccacagtgattccaacaagtgtcttccaaacaatccaccccactcatttcattcaagaactatttctgaggcagctcccaggacagggtctcatggggagtgagcccactgtgggggttgtcctggctccctccttcatgaagcaaggggagaggagcccactccaaggcactggcccttgggaggatgcactaattcctgcctgactcaagttacatgtgtgggtcttttaacagttttctatacctcctagaaaggaatattcacgaaatataggatttttcctggctacaaatatatctccagggttcaaagcagtgcatgacttgaactgcgtgcttggattttgcatgcagacagggctagcattgagggctctgttgctttggaaagatctctcctctctcacacttaccatcaattcctactcctgaagttggcctcctggtcacttctctttctggaatttttatagtgaagaatcagggaatcgcagccatgaatgctgtgtatggtcacaaggtgggtctgcaagtaaatcctgtgccagaggccaagccagggacatgctgggaacacctagtcagtagcatccctgggcctcagccccaggaaggaaaaggagcatagattgtagtgtagtgtcacaagtttcctccttctctggaaatgtgagttctcatccaggtctgcatcctccatctcctagtccctcatcctctgtctctgcctcatttacatggagatgacaatttttgcttggctgccttcaaatggctacagctgaaatcaaatgaaatagtagaagagaatactaaatataaatctgttcaaaaatgtgttagatatgcacttccttattctgtactgcaaccacttccttgtctgctagggagacatctggacatattcctcacctttcccagtgtgtcagggatgaaacatagccctggggacattataggactgaacacaaagtaacaacaatgtggaaaacttgggtagggacttccacacttcctgtgcctctcttctcgagacagagcaaaggcagatgaggtggatcctgaggaggagaagtggctgtcagtatatattcacagggaccacatcccagctgtcggtggttctagctctgtgtcttgtgtctgggtgacttccaccaattcccagaagagactaagaatctctggataggactctcgagccaagatggccgaataggaacagctccggtctacagctcccagcgtgagcgatgcagaagacgggtgatttctgcatttccatctgaggtaccgggttcatctcactagggagtgccagacagtgggcgcaggccagtgggtgcgcgcaccgtgcgcgagccgaagcagggcgaggcatcgcctcacctgggaagcgcaaggggtcagggagttccctttccgagtcaaagaaaggggtgacggacgcacctggaaaatcgggtcactcccacccgaatattgcgcttttcagaccggcttaaaaaacggcacaccacgagactatatcccacacctggctcggagggtcctacgcccacggaatctcgctgattgctagcacagcagtctgagatcaaactgcaaggcggcagcgaggctgggggaggggcgcccgccattgcccaggcttgattaggtaaacaaagcaccaggaagctcgaactgggtggagcccaccacagctcaaggaggcctgcctgcctctgtaggctccacctctgggggcagggcacagacaaacaaaaagacagcagtaacctctgcagacttaaatgtccctgtctgacagctttgaagagagcagtggttctcccagcacgcagctggagatctgagaacgggcagactgcctcctcaagtgggtccctgacccctgacccccgagcagcctaactgggaggcaccccccagcaggggcacactgacacctcacacggcagggtattccaacagacctgcagctgagggtcctgtctgttagaagggaaactaacaaacagaaaggacatccacaccgaaaacccatctgtacatcaccatcatcaaagaccaaaagtagataaaaccacaaagatggggaaaaaacagaacagaaaaactcgaaactctaaaacgcagagcgcctctcctcctccaaaggaatgcagttcctcaccagcaacggaacaaagctggatggagaatgattttgacgagctgagagaaggcttcagacgatcaaattactctgagctacgggaggacattcaaaccaaaggcaaagaagttgaaaactttgaaaaaaatttataagaatgtataactagaataaccaatacagagaagtgcttaaaggagctgatggagctgaaaaccaaggctcgagaactacgtgaagaatgcagaagcctcaggagccgatgcgatcaactggaagaaagggtatcagcaatggaagatgaaatgaatgaaatgaagcgagaagggaagtttagagaaaaaagaataaaaataaatgagcaaagcctccaagaaatatgggactatgtgaaaagaccaaatctacgtctgattggtgtacctgaaagtgatgcggagaatggaaccaagttggaaaacactctgcaggatattatccaggagatcttccccaatctagcaaggcaggccaacgttcagattcaggaaatacagagaacgccacaaagatactccttgagaagagcaactccaagacacataattgtcagattcaccaaagttgaaatgaaggaaaaaatgttaagggcaaccagagagaaaggtcgggttaccctcaaagggaagcccatcagactaacagcggatctctcagcagaaaccctacaagccagaagagagtgggggccaatattcaacattcttaaagaaaagaattttcaacccagaatttcatatccagccaaactaagcttcataagtgaaggagaaataaaatactttatagacaagcaaatgctgagagattttgtcacaccaggcctgccctaaaagagctcctgaaggaagtgctaaacatggaaaggaacaaccagtaccagccactgcaaaatcatgccaaaatgtaaagaccatcgagactaggaagaaactgcatcaactaacgagcaaaatcaccagctaacatcataatgacaggatcaaattcacacataacaatattaactttaaatgtaaatggactaaattctccaattaaaagacacagactggcaagttggataaagagtcaagacccatcagtgtgctgtattcaggaaacccatctcacgtgcagagacacacataggctcaaaataaaaggatggaggaagatctaccaggcaaatggaaaacaaaaaaaggcaggggttgcaatcctagtctctgataaaacagactttaaaccaacaaagatcaaaagagacaaagaaggccattacataatggtaaagggatcaattcaacaagaggagctaactatcctaaatatatatgcacccaatacaggagcacccagatacataaagcaagtcctgagtgacctacaaagagacttagactcccacacattaataatgggagactttaacacccaatgtcaacattagacagatcaatgagacagaaagtcaacaaggatacccaggaattgaactcagctctgcaccaagcagacctaatagacatctacagaactgtccaccccaaatcaacagaatatacatttttttcagcaccacaccacacctattccaaaattgaccacatagttggaagtaaagctctcctcagcaaatgtaaaagaacagaaattataacatactatctctcagaccacagtgcaatcaaactagaactcaggattaagaatctcactcaaagccgctcaactacatggaaactgaacaacctgctcctgaatgactactgggtacataacgaaatgaaggcagaaataaagatgttctttgaaaccaatgagaacaaagacacaacataccagaatctctgggacacattcaaagcagtgtgtagagggaaatttatagcactaaatgcccacaagagaaagcaggaaagatccaaaattgacaccctaacatcacaattaaaagaactagaaaagcaagagcaaacacattcaaaagctagcagaaggcaagaaataaccaaaatcagagcagaactgaaggaaatagagacacaaaaaacccttcaaaaaatcaatgaatccaggagctggttttttgaaaggatcaacaaaattgatagaccgctagcaagactaataaagaaaaaaagagagaagaatcaaatagacacaataaaaaatgataaaggggatatcaccaccgatcccacagaaatacaaactaccatcagagaatactacaaacacctctacgcaaataaactagaaaatctagaagaaatggatacattcctcgacacatacactctcccaagactaaaccaggaagaagttgaatctctgaatagaccaataacaggatctgaaattgtggcaataatcaatagtttaccaaccaaaaagagtccaggaccagatggattcacagccgaattctaccagaggtacaaggaggaactggtaccattccttctgaaactattccaatcaatagaaaaagagggaatcctccctaactcattttatgaggccagcatcattctgataccaaagccgggcagagacacaaccaaaagagagaattttagaccaatatccttgatgaacattgatgcaaaaatcctcaataaaatactggcaaaccgaatccagcagcacatcaaaaagcttatccacggtgatcaagtgggcttcatccctgggatgcaaggctggttcaatatacgcaaatcaataaatgtaatccagcatataaacagagccaaagacaaaaaccacatgattatctcaatagatgcagaaaaagcctttgacaaaattcaacaacccttcatgctaaaaactctcaataaattaggtattgatgggacgtatttcaaaataataagagctatctatgacaaacccacagccaatatcatactgaatgggcaaaaactggaagcattccctttgaaaactggcacaagacagggatgccctctctcaccactcctattcaacatagtgttggaagttctggccagggcaatcaggcaggagaaggaaataaagggtattcaattaggaaaagaggaagtcaaattgtccctgtttgcagatgacatgattgtttatctagaaaaccccatcgtctcagcccaaaatctccttaagctgataagcaacttcagcaaagtctcaggatacaaaatcaatgtacaaaaatcacaagcattcttatacaccaacaacagacaaacagagagccaaatcatgagtgaactcccattcacaattgcttcaaagagaataaaatacctaggaatccaacttacaagggatgtgaaggacctcttcaaggagaactacaaaccactgctcaaggaaataaaagaggatacaaacaaatggaagaacattccatgctcatgggtaggaagaatcaatatcgtgaaaatggccatactgcccaaggtaatttacagattcaatgccatccccatcaagctaccaatgactttcttcacagaattggaaaaaactactttaaagttcatatggaaccaaaaaagagcccgcatcgccaagtcaaccctaagccaaaagaacaaagctggaggcatcacaatacctgacttcaaactatactacaaggctacagtaaccaaaacagcatggtactggtaccaaacagagatatagatcaatggaacagaacagagccctcagaaataacgccgcatacctacaactatctgatctttgacaaacctgagaaaaacaagcaatggggaaaggattccctatttaataaacggtgctgggaaaactggctagccatatgtagaaagctgaaactggatcccttccttacaccttatacaaaaatcaattcaagatggattaaagacttaaacgttagacctaaaaccataaaaaccctagaagaaaacctaggcattaccattcaggacataggcgtgggcaaggacttcatgtccaaaacaccaaaagcaatggcaacaaaagccaaaattgacaaaatgggatctaattaaactaaagagcttctgcacagcaaaagaaactaccatcagagtgaacaggcaacctacaacatgggagaaaattttcgcaacctactcatctgacaaagggctaatatccagaatctacaatgaactcaaacaaatttacaagaaaaaaacaaacaaccccatcaaaaagtgggcgaaggacatgaacagacacttctcaaaagaagacatttatgcagccaaaaaacacatgaaaaaatgctcatcatcactggccatcagagaaatgcaaatcaaaaccactatgagatatcatctcacaccagttagaatggcaatcattaaaaagtcaggaaacaacaggtgctggagaggatgtggagaaataggaacacttttacactgttggtgggactgtaaactagttcaaccattgtggaagtcagtgtggcgattcctcagggatctagaactagaaataccatttgacccagccatcccattactgggtatatacccaaaggactataaatcatgctgctataaagacacatgcacacgtatgtttattgtggcattattcacaatagcaaagacttggaactaacccaaatgtccatcaatgatagactggattaagaaaatgtggcacatatacaccatggaatactatgcagccataaaaaatgatgagttcatgtcctttgtagggacatggatgaaattggaaaccatcattctcagtaaactatcgcaagaacaaaaaaccaaacaccacatattctcactcataggtgggaattgaacaatgagatcacatggacacaggaaggggaatatcacagtcgtggggggaggggggagggatagcattgggagatatacctaatgctagatgatgagttagtgggtgcagcgcaccagcatggcacatgtatacatatgtaaataacctgcacaatgtgcatatgtaccctaaaacttaaagtataataataaaaaaaaaagaatctctggataataacattagacacatgaatgggtagaatcaaatagaattgaagttttagaataaataaaggttaagatcagtttgagggataacgtaagagcaatctacctgcagcaagaatggagagggatccacagtgggtaagcaggtgtgtggcagtggtgggaagggagcaagtgggctatggacttctcagaaaattacttacttccttaacttctgggccagccaaggtggagtgaggtttatcaagaacacaggaatttgaaaacccaatgctcaaaatcaattgcaaaagtattaaaacaaaaactttagacaaaataaatttaacagttctttgctgtttaaacttaacagcaaagaacaattcacaaattgggtagcaatcaaaagtaaaaagtgcttagacccctctgctctagtaacattagcagcaaacttttgtaagctgaacatgggagcaaaatatagaaattagctgattagctagagctaggcattcgctttgcctgggcatggtgtggtgggaggccctaggcgtttgcctcatttgggaatcatgtactgggagatgtctagttatataagcaattggctggtttgactgtttgtgactgactgaggctaggtttgtttttttagatgtcagttacaagtaatgcctccaaggtaagcatcagtttgcttacataagagctacagtacagagacaacctcaagctaatggccttcttatttgctttaacaatcatgagaggttgaccaaaactttgggcattaactctgctctctgtcatgattataatggacttagttggtctcagtatggtattcataagacgccaggctaactgaataattctttctgttgttcttcatgtttttgttactctaactggggtgatgttgtttgacaaagagtaggtggctccacacaaacatttaagtctcaagaggacacagtgcaccaagaagactaatcttaccatcaggagggaaatactgaggctaaagtatgctctataaccaaggccaccatgacccaaatcaattaaagtcaaataaattaaagaatgagccaaaagaaaaatgtacttgttttaaacaagtgccttactagttgatttcttgcaactgagtttctcctataccagacgtatttatttaagtgcagcagacagtgacagctatctcacacccccctccctgttcagcaaagaggtattccaaagcaatactgtgaactaaaacaactttagcaagataatttggaggaggctgtggcattatagcctttacagtagtcagctatatgtttgcaacatatgtctcatcacctcatttatatttgtgttagtacacgaaaggagtattctaccacaagatgccaatttagggggatatatgcctgctggcaaattctttgttattctacaatgcaaattaaagggtgttgaccaaggcttagtttccagacagttatggagtaagagttgtactgttgaaatcctcaatgcacattttatttctcatttatcaaagcctggatttgctcattcttatggttgattattaaatcttctacagataaaaatatatcctggaggggcacaacagatagttccctgtggggtgctttgtgtgtaagtggccaccggaagataagcatgagtattactcatccaaggctagtttattgtattaccacatggctgaaggctacccacaattaggggatttgggttatgaatgtatctataaactgttgcataatctttccctttggtttttaaattcagtttctggcaagagttcactgtaaaatcctcactagaggttctgtctactgttagatttaaacaagaaatctgaacatatgagtcttaaagtataatccacatatgcagttccaacaggcagtcacactaggaatatcagtaaaatttgttacagggtgaactagaggatctctaaaatcatgtaagaatttaagtttagcatgacatctccaacattcagttatgattcttgctgaagctattgattgggagatcctgatcatagcattattctgccactcatacacaaaaagaatgcacagggaaaagaaagaaaggaacaattattttatgatgacattaagagaagtcttgattcatgatcttgggaaagctgtctacatctagaatgttatctgcttctggggagaaccacactgtgcagtttcaccttggaatcatcaatggatgcgcagctacaagagtttgaaggggacctgtggacccaagtctcaaggcccttaagttttgctgaagtgtggatactgagaagaacttggtatggtcatttccagtggggtttaggcacagtctttttctggtgtcatttttaaaagacccagtctctgggttctagattacgaaaggtctggttgtcattagttggtaggtcatgtaaggctccttttacttgatgaaaatatactttgaaatcatgcagtaaaatttataacgctgactcatgttggaatttataaaatcaggagatacataaggctctcttattaggtgcataggtcttctggtaacaagttcatgaaatattaatttgtgttttcttgtaggagtggatctgattgccaccaaaactgatagtaatacatttggccaagaaagtcttgttgattgattagcttttccaatttcagtcttaaaatgctatttgccctttctccctttaaaattaagtatggtagaaataatggtaatgccattgttcgtgtaataccttatttaactgtgttagtatttctattgctggagatttactcaggaattcctcataaaggaaacacattttctaaaaacgttctacctaactattatagtattagccttcctgcatgggaaagcttctatacaaccagagaacacatagatttttgtaagaacatgttgatatcccactgagagtggcaattgaatgaagttcaactgtaagtgctcaaatggtccagctagtggtggaaatattccacctgaggtttttattatttgacagtacttcttacagaatttaacatatcaaataagcctatttcgtttatcattatttgtaaggagagaaaaaagactgttttgagatgtgacatgggtcagctggaaactcccaaagttagtttaaggtcacaagacttaatttagaatttgatttgggatataaatttttaaaaaatttaaaaaaattaaaaaaagaagaaaaaaataaaaaaagcagaaaaacaatttgatttggggaagtggtcaaaaatattaaggcttgaatacttgattaaataggatatgaagtcactgtgacaaagtgttgttactcaagatgatgatgaatagattttaaaggcaaatacagaaagttacattgttatagtgaaaaccttgcctcttttaatagagaggttttggttttctaaagtaactaaagacttgacaaaagacaacatgaagcatagtaaattgttttgctaagacacagtctttgtttcctagctagaattcttaaaaggctaaaaaacatctttcacaatctcatattagggcagtccaataattcaagatatccttgtcattttaacataggaggccaaattctagtgttacatcagtgtacttttgatatgaataatcaaacaaattataaataatttctttcaaatcttatcaaactttatcacacatgaaatatttcccaagatttctttccacaaaccttctacaacttcttttatatcaatttggttttgtcctatttgctttctcttttccattgtggaacaaccagccattctactttaggttaaaaaaattacttttttcttaaagaaaaacacatcctttatatctcgtagcttcccctacctaaaacttgtcttactattcttacatgtggagttggttctcttattatttctagcattaattaccatatgttagttataactcttaactactattagcttgaatttgtagtgaaaactagggggtaagcaacagtgaatggcctgtttgttagtgatgatggtggtattgtttttaggtattttggattcttttctattgcaccttgcaaatgaacaatgttgccaaaattaaaacttccccatgtgaatgctgtcatcctaaattattcttagcaaggttaacttgtttgtccaaaaatataaaggttcgtggtccctaattatcatacataaaattagccagtatcccagcaagtggagtcccaggctcctttctttggagaaatcaattttcagaaagtacctacctgagggctctaactggtctcagttctgctatttattggattcaatctgattctgaatggagactggctaaggaaatgtgcaaataaagttggagaggtcaaaatgcaagtttctggagctcctatttgaaaggaaactcacccccactttccaattgcagcaagagagcaccgtggctcagttggtgcctttgctgggtagtaggttttcttagatgcagctggagtttgccttaggattccacatctgacactaaattgttaaagaaaaactttaaacaaaatgaattcaatagagtttatttgggcaaagaagaattcatgaactgggcaacactcaaaactggaaaagattgagaaagtttttctctagtagcataaacagcaaggtttcccaggctgaacaagggagcaaagtcaagaagttacctgattggcttagctagatgtctaccttatttgggcatgatgtaatgataggtgtaatgatgtcaatatttatctgcaggcacttgtaaacttcagagagaccagaatcccctgaacggatgttaaaacccaagttttagccaccccacttcccaagacactgaccaagtaggtgtgagtggggccaggaaaattgcatttctaaccagcacacagggaatggtgatgttcctggtcctaggtgtttgccttatttgggtatcttgtgatcagaggtccctagttatataactaactggctgcctgtttgtggttgattgatgctagattttaatttgtaagtcagccatgagaaatgcctccaagttaagttttggtttgcttatgaaagagctccaggtacaaaagcaacctcatgataatgacctattacttgctttaatagaggacattgtaataatgtttattaaaaattcttaagaaattttaatgaaaatattgggcaatagtttaatctctgagcacattgcctataagaaagcaataaccatatatacacagcgataaatataaaagaagcattcatcataccacttttcataatacaaaaaagtagaaaaatttaaacaattaattatgggaactgactaaatataagctccagctctgaggagctgcagtgcagagggccaggctgtcagggccagtgcagcctctctcttctccagaggcaccgtcctgttgcctggggtctagaaactctcctttttctttacaatcaggcatagtgttctgaccccttccccaattcagcgtgcaatgaagaagccattctcagcctcatcccaatgccctttgaggtgagttacttctcacttgtggtttggtctgcatgcaccccgcaatgatggcttctgaacctgcaccattccaagtgtggtctgggtaccaggagcaggtccgtcccaggagaggtggtgagacatgcaaattccctggccctgcccagacctagtggttcagattcctgggggatagggagaataagaacttaggtttagggtatttagaacttgccttcagggtattctagtccctttgaagttcacaagtaactacagataaatgctgaaggcatcttcatggagaagaaacttaagtcttgtccagaaagagtactttatttaatttttagctggaggatgtgatggtttctttctcgaggccagactgtggaccataggggtatatcctgctgggaggcaaatgcagaaattcaaccctgaattgggtgccctgaggctggggagactgggacatatacctgctcacttccagtgacagaatgtgactctcagatgtgacctttcccacacctgcagggtgcacctgctctgctgatggagctcatttgcacagatcaacccctgagtgaagctgggggagatacaggtgcctggcgtgggagctggtagcatggtgtgtctcaggggcaccagggtccagaggagctcttagcatcagagactggtaactatggcctgaggcccaagcagctcactgcctgtttgtgtaaataaacacttattggaacacaaccactcttacatgtttgcacattggctattgctcctttcaagatacgacagcaattctgagtagctgagagagaccatctgcccacaaaggccagaatagttactctctggcttcttcagaaaatttttttgccaaaccctggtttaggtgatttgggcaatgtcttggtagcatctagtctgcccgtgcctctcacactgcatcccctgggggtgtgcattcctgcaaatcctgcattttcaggggatttctgcatccctggggatttgtaagagcgcagatgcattttccaaaggtcagaggccctgaagttggacatttctaagattctttcagaagatgctgctgctccagatgccaggacagctttataagggtgaggctagaagtccttcctcttcccaccaaccttccacgaaccaggaaaggtgtgtgagccaccccttgagaacagaggccacatgtgctgagtgggacccagaggccctgtcttgctcagttgtgcacattgggtgtcctgcaagatcacagacattttacctctggccacatgggtcatcatcagccacgagcatggagacagcagctcagacttatcttggttgtgccacctggaagctggcttatgaggtcttaagggagggaggaccccactgacacagatgcaaataggctgcccttctgagaggaactccatcaactgctcagccccctccctccagaacatggcacaggaagcttctgcaaatgctgatgtttaatgacctattctacttgaggaacctggacagtgaggattttctaaaatgccaagtcataaaacctcagacacttgcaaaataagagaacaaatatgcacggagctgctcagccactgatatgtcaactcctgggaacagctggtgtccacgggggagggggcagcatgtggccaggcatgtgagtggcttccactcaggagagcccctctgagcaggtcttgttcaggagttcaaaatatgtcttccagggcatggtttcaacagtgaagaagcagctgaaggtccgagggaacaaacaggaagagacagtagggcggggtttggggaggttcgggaatcttgtggcatctgccctcaacacaggttccatctccaccttgcccattcctggggccagcaattgtgccacgtggctctggccttcaggtctagcctgagcctgaggccaatcctgaactacaacgtgatttgaggctccctccctccttagccagggtcacttgtgccatgcctcctcctccagcccgtgcccctcaggggaaccccaggctgtcctggtgtgatccctgcatccaagagcagcaggagaatgttttgtcccagtggaagcagttcccagacttaggcaattagttacctatttgttaatcttacaataagggggttgactaagaatgggaagttttcccagagccaggctttgcttggagctcgtcccctagagcaggtgctgcagctcagcagggcctaggagcgagggcagtggggcttcttctcagcctccaccacttttgggtctagggcagggtagggaaaccctgagaaaagtacccacagacattgtcaccattgtctccaggctctttctctagaaggcagggaagaagtggggaggaagaccagagagaaggttctgaaggccatgtggcccaggtgcaggcagctgcaatggtgtcagagggcagaatcaggaaactcagattggccaggggcctgaaagtgaacccctgggcttaatgcctcactgggcttcccactaaggcacaagcagggcagcctggtacagcctgctgtgggctcacttccctttgtccctcggaatggctttgtcagctgctcctgtgcccacaccacaccccatgcagcatccacagctgtggacctgaggaaagctgatgccctgtcttacgttgttcagctccaggctttcttgaaaagggcagttgtcaatgtcatcttcaaatttcctacatacggtttggcgcagttgcagattcatggagaacaccatcttacctcgccactgttggacaaaagaagattaaagtggatgcaccgtcttcctgcccctaagtagctactagtgaagatgccatttgagtaggagaggccccaacactttactgcatttgagagcttgcccatgggcctggcatcagctcactggaggtgaaacccaggggatcttctctagactgaggagttaagagcaaaaagcaggtgggcatggtgggtctggggaggatgcaggctgagtcagaccccactaacacattatccacctccacccacccccatttcccacggtgagactccagcttcactctcagtaggcatctgatcttgcagctgcattcccagaggacagagccacatgtccgggagggtgttggatctccaagagttttcagggtaacttcagccctgggacagagggagcctcatctacagtgtgttgtcaaaccttccaagtgacctccagcaagaagaatgacacacagcgctcccactacacacaggcacacaccctgggaaaatgggttcaagaaataccatctgccctattgcaaagtgcatgctgaagttctccttgccctccttcccactccattctatttaattccactccatagcctccctctcacccatctattcttcccagcccccaaactgatgctgggattgccatatccaggaagccatgtggaaagcttttaggacttactgtcatttaggacttatagaccatagtaaggagcttagattttattctaacggtattaagaatggaggcttacactgaggtcttggagaatcaagcaaagcactgggaaagcagaagcatgaggcctggccaatctcaatctctgagacttccaaggttccagcatgaatattagcagccaccattactggaccagatgcccctctgagggttgcatcaggcttttaattctcctgagaggaggcagcaaatgagcaaggaggaaaattcctctgtaccagcattggaatcctgaggatggcagtgaggaatccaccccaggaggcagagaaccagccagagccttgcacagagtctttccagagcttaagctctgtgcggtactagagtccctctgcctttctttcaggctcttggtgctgagaaaggaagagcaatgctccttctctctctaaaccagaagttctccactaggagggcattttaattgttcatgcctgaagcccagatgaactgtgcattcctgaccacatttaatgatttcatcaaaaaggcaagcattttaggataaaggtccattgaggaagagtgtaaattggccttcagttcattaagtgcagacagagcaaggagcccagagaaggtggagatcagagaactaacctttcacggtggcctctcagggctgatggtgttctttattgccctcgaattctcactgttctctctctgtctgcctgtctctctctctctctgtctctctctctctgtctgtctgtctctctctgtctctctctctctctccctctgtgtgtccttgcttttccattttcattttatgacctggaaatgtttatcagtctctttggttattttctcttcttgtcagcttcatctccttagaagtccttattttgaagtcactcttcagttatacaatgtcttaaaaatcatgaagattgaaaaatatattttgcatgtgaatagacatttacctaatttaaaaaaaattttaagttcaatgttttccaaaactaaaactaccgtaattggttgtggactacctgactatggactgctgatggtgaaccaagtctcctagactagacatcttggtccctcacttaggggcagatggagaaggacaggccagaagaggatgtggtcaccaacctttctgtccatgctatcctccctccatgaactcaggacgcgcaacagcctgtaggcatgctcctccttgctctgcacgttgaaagtgttcaaggcaaactccactgtggcgaggaacataggatcctggactattttattattaccacccatttcctcttcagaacaccaggcataagtcaccaggagctggaagcccatgagaagcagtgacagtgcccagggcatagccttcctcctctgcggactcgacatgatgcaggctccagcagcccttgcctttgcccttcagatccctggcgtccactggagccttccagggctcaggtctggcctttaaattcacctgctggggcagaaactcctccctccaggcctcacctctgcagttacaccctgtctctcccacacatggcctcccttcttccaaaggcgtttaaatcatctcctgtttaggggagaggaacagcacccaggcaggtgggttggaaaagactagcaatgggagagatagtgccctgaacatgaggcccagccccagctgccccagcacctccgcaggctaaaggagacctctactgggcgccccagagtcagagcccggcacaggaacacaagtgtgagaggtatgagtggaaggtgagccctggactcagcagtgggggtgggctgggagggggaggttaggtggaaaggcagagacaaaaggatggaaagggatgacagtggatgctagtatcatgggtgagcaggtacagcgccccgagaaagcactgggcctcttgagagagaggcggggagcccgggaggattggcgggatgtcctgcaggtgtctgctcccccgagggtctcgggaggggggcaccagcctgggggtcgtgggcagaggttgaggaaatcaagagcaggagcccccaaccctgttctctgcacctccctaaatgcagcttcccagcccagggacgcgctgccaagtgctggtactaggggcctggctagttatggctgcccctattcctcaaaggtgtttccaggacgggtggccgcttgcaattggagcagtggagaaccagaaagacgaagatgccctcagggatggctgaagtgcacccattaggttgtcacgggttccctcctgtggccacagccggcacagcactctgcggcacagtttgtgggtggagattctgagttctcgaccaagacccacatagcctccaactccaaccgcaaatggggctctcaaaagactgaataatgcactcttcacagaccagacttaagctttgtccctgtgaaatatgcctttgatgtttatccgtagctccttgtaaacttcagaagcaaccagcatcccctgatgtcacgttaaaaagcaagttcctagtttccccacccaaagattctgacccagtagctgtgagcagggccagggaaactacatttctcaccagcttccagaggatggttgtgttcccggtctcagaaccatactttgagtggtgcaggttcagaatacttcctgggaagtgcatacagaccaaaccacatatgagaagtaactcagcttgaggggcatggaggtcaggggatgagaatggcttttgtggggcacacaggatgggggacaggcttagacagcatgcctggtgataaagaataagagtttgtttctagaccctgtttgcaaagaaaaagcaactcaatgtgacaattccaggaaagcagccagatgtgccaaaaacatcacccaaggagtctgtatcctttctctgatggcgttgagttcactggaactgcagctgaagcgtaactaatgtggtttcttagctggagagtgatggtgcacgtaggggtaggaagggggtgtcagtgagggcggaaatgcctttgtgggttttgggatgagcaggccataaggtgctgtgagaactagaatcctgatgcctggaataggttgcgagtgtcctgagagaggcctgcaatgcccatggaggtcactctcaccttgtaagttcagcggctgacaaacttggggcatcctgccaattgccagtggctcccccaccattctgagggccgatacccacatgtgctccaagggagtgcccacactcactcttacatgagcagtggtttagggtcctgggcaccagctctgtcctcactgtgcagccaaggaggggacagggatccccacacccagatgtgagaccacgggtgtacagacaccatggacccttacaagtgtgtctattttcttgttgaatccccagtggcctgggatggcctcacttcccaggtggagagagacgggaatatcaagacatagccaggtaaagagaaatacatgtgggctccaggctgaggagccccgaagacgtgggtcaacatgttgccgaggccagagtgaaaccggacggcccggaggggctggctggccagcccacaggcacagctcacagctctctgcagggctatccccaggtctcaggtctgggaggctttctctcctgagtccccttgcaagagttctgtctcactcagcttcttcctgggcactcgttggcctgtctgtctctggggccaccgggacttgtctggtgctctctttgtgttgctggcactggcaccgaacacccatgtggtctcataggaaggtcccagtaactcctcactgaaatggacctgcttttccagaaacgaggccctgtatttctgaacgcattcctttgaatgattagagaatgctggcaacgaccaggaccaagccactggcccttttctgtgaagctgaacatgaggcggtggacgaggggaagcccagtgactcttcgggacacaggacgctctccccagctcccgcagaccctccagctgagtgctctccccggggtcggactcatgtccctcactgcccggcctactcagccacatgctctaaaggtcccgtgcgaccttgctcactgcctgtttcaagctgggccaggctcagcggggcctgccagtttcaggatcgcctgctgggctttgggatcacttcctcgggaccctccccattccccctgcttggcatttccctaggagactccccagacaagccagcattcccaggggtttccgtgtgctggaaaacaaggtggtgtccaggagatcaaaggaagacagcaggggcagggagaagcccggactcagagcagagtgagtgatccagtgattgctgtcatagcaatcatcaaaggggcagctcggggcaggggggtgagcggggctgggtgggggtgctgccagggaattccagagccccctccactcctccctcccctcctccaggttttccacctggggggttcttcttagctcagtcttcagctgactttgagtttttataatttaaggaattaatctcatatagacttatggcaaatttaaactgagaaagaggaataatgattgaattaaaaaatgacaaaaggagaaataaaaatacaaacattaccggtaaatatagaggcctaaatcaggggtcattcgtaccacatgcaaatcggaaggcccatgggctgtttcttctccttcctgtgggtccagcaggtccctcaccctggctaagtcgggggtgctgccctgggcccaggagctttgctctgaagaggaagtgctgccccagtcaccctcagcagccctcctgtttgctggcctttgccgaacacacctgccttcgctcctcagtgggcgtttcctcagcttctgctgtgctcccgacggaagcctctcccatccaacgcagcccattgttttctttcataagtactttagtttttaaaaaactgtaagttaatttaaatttaaaacagtacaaaaatgtcataataccacttcttttttatttttaaaattttctgtagagatggagtctcactatgttgcccaagatgttctcgaactcctggcctcaagtgatcctcatgcctcagcctacaattccacttttactaagtgaaatgtaggtttcaacataatagaaactccaaataccagtggcttaaacaagctggtgttgctttctctctcaggatgctgacaatgctagaattctttcataagcctcactcctgctgggcactgccttaggcgctcattgactcctttaagcctcacatagtaacagttcagccaaaaatggtatatatcattacgttttacgtttttaacattttgcataaataatgactgtatgtcttaccactttatgcctttactgaaatcatatttgtgagcatcacctgtgttgacacttgtcgctctagctccttcattaccactgttttgctttattcactgggaccttgacctgaatgactgtagttaattaagtccttcctgatttaattgggaatggtgaaatagggtggagcttatagggtcaggtgcttgtgatgaaaactaacagacagtggtttattaaagcattctctactgacttgattttacactgggttgattccactcatttcctcttaaattggggttgcaacgggcacttttgtcctggttttcatgtgcacaagtatgacagcttctctagggtcagcaccagaaagaaaattgcagacatatgagatcacctcctttcagttttattagggatagctgtgctgatgattttcttttctttattcttttttgagacggaggtctcactatgttgcttaggctggtcttgaactcctgggctcaagtgatcctctctccttggcctcccaaagtacgaggattacaggcatgagccaccacgtgcaacctgatttctttcaccatatagatttttcttaaaaattgaagacggtttaatgtatcaatgttttgtttagggtatgtgcttttgtaattttcatttcaacaatcctttcctatgctcttctatgttctgtttcaccatgttctttcttttgcttttcacatttatgtgtgcgatccaactggaggctaagtgtgtgtggtgtgaggttggaatcccaggatcgatcgtctgccccaccacctgcgtgcacagctggcttttccagcattgacgatggagcagttcattctccaccctctgattccaacagcatttctatcgtagtcccctttccccaaaaggctggttgcctttgagcctcttttctattgtactggctgtatgaaggaggcacaggcctgagctaagaaggtcattgtttgatcttggccaggaaaggaagaaaaattcttgggcacttcccagacctaggcacacttcctgggccctacctgctagaatagatgggtctgctccctggttctagcccctgactccctgccacaccctcccatcatcgggctgctgctttgcactaacatcctctctttggggcatatagtctgattttggatcccagcttttcggaaaagcttcatgtattggccatgattattgatgctactgttatcgtcacaagcacctcaccctgcaagctcaccgtgcccttccttcattctttggaaacatgagatttgttcttgcgggcagcttgtcttcctgggaagttgaaattacctttttgatgcagacaagcacttgtcctgaagagtaacgggaggaaccaggtgtctatcactgagaggcgggagtgcagaactggagacaggataagtggggcaatcttgactgattgcaaggaaatagtactgttattggctccatttgtagaggctggagtctttagatgacttgtatggtttatagactccacggaaggaggcaaagcagtagttgaggaggtctttggagttgggcacatgtgagttcaggtctcatttgcaccttttactagttgcatttcctgggggcacatttctactttatgtgagcttctgtttccacaaccgtgcaattggactcttgtgatttctccttcatggagctgtcatgaagatgaatggggagatgtatggaaggcactggcaggaggcccagcaggaccaggccctcaggagatggtgtttgtgctgctcattctcatcaccagttctggggggaacatccctcatgagccaggcttgttgatgacaaccttctcagcagtcaagtggcagaggagatgaggagggacccaaatgtccaagctcccaccaggggtaggcaggcaaaaaggaggagcagaggattctatggcttgtcagcaattaccaggttctctgggacagtgtagacagggcatggaaatgggattgcattttactgtttggctttgagtttagacttttggtccaagtcaggttgggatcagaactcaagagagtatcttctggataattaaatataatgattatctcttcgaaaggctctgacaaccaaactcacgttcccaagcttcattttaaagtgttgagatgcttgggctcacgtccttgtgttctgccttgtagctgggaaacctggtgcacctcagtattcctaagccccctttcctcacctatggttttggatcaagtttagctgagagatcatatacagtgacactgtgtgaccccttacagtatgatttgaccgtttgctgttagaagacccactatcccccatcctcattctgaagtcaaaacagcatccgggctcctcttcttctctattgggagcaagttttattttaaaataaaatcagggataagtgccaaatgtaatcatcagctgagaccctcaaaaccttttgttccaaccactctaatttctgtcacaatggccccttgtcactgtgagcctttctgtagagggtatttggggctgtcttgcctctgaccacttcatgcacactgatcacagtgttctcaatacttttcattttgacacttttgggcaaagtttacctctacttctttgaaaacattctctttagacttggccaatttgacaaacgtgttctttctgccttctttagtggttgtccaggcatggacaacggctgctttctcctggaactgattccattcagagtccttttggctttcttgcaatagttttcctttgattcagccaaattttccacttcttcaataagtgttatttagagatcaacctcaaatctccaacactggcacttattttgaaaccttaagcagtaaatccatgccagagataatacttccttttgggggacaaaaaccgattcagtctattttccaccttctttacttttccagacacatcagtgattcttgacacgttaatatcttccttaagcctcaccacaatccatgtgattttaggctaagggattagatttgggatctatttctccaacatccatatatagtggttcaagataaaagataacctatatcaatatttaaatctaaatgccaaatattggaggtggggttgtacccggataggtcgattgccatctttcacatcagaggccagacacatattctttgaaataggcaaatgcagttattgttgggtaggcctacggtctagagaagttgtgaggtaagatgccaggagaactggaacatagcaacctgctctttaggactgaaacagaagctccgagcagacggacacttggatttttgtcttaagctcatctgcaatttctatcatgtgcagacagtactttgataataataaaataatgtttttattttttttttagctttttttgcatcctcttgaattcagagtctttcaggcccaaaagggtgatgtgggttgggggccaggggtaagaggattgggtgaggtgagaggacttgctccttagggggtgctccaccatggacactcagatgagaagcaggtgggaggagaggaaagctcctagaaaatccagtgggtcatgtgggaagtaatttgtggcacttgtttttaggtttaccggattaaatggtctaagataatcatgggggatacttcatccactgccacacatttcaagagcttaaggctagagtctttgaagtcaaattctaggctgcagaatgtgcctgcagggctccccagcctgtaccccatctctgcgttccccactctgtttcaggatatttttctacagggctttcacattctcatgagattgcaagattgcttcagaaaaactgaattcacagcaatgcttactcaccctggtttgcatacacacacacacatgcacacacacacacacaccccaaaaaacaaaacataaacaacaaagactccttggaggaactttagagcactaaactcagccctgggtcaagtgggctctgccccagagccttttgtattttactttgtccttagaagggtatcagagtcctggaagtgtggctggcctccatgttggcttgggtcctggaagagacagacaaaggctatttggcaacagagagaccatagagccctagaggattcaagcttaaatcctccaactacagattataaattattaatacttccagtggacttgtttgtctttccttgccagaaccaacaattctcaaatctgactgcccatctaagccacttggggagcttaatctatagatgtttatatgaattctgaagccttacctcatggactcagtgtctgcagtgaggcctgggaaccggatctttaacagccatggcaccttctgcaggctggccttcggtaaccactgagtggttgatccaaaggtctttctgagctctcctggcccaggatcctctgattcagtgaatgcatccctagcaaaggcaacacagagcagggcttcagtcacttactgcattcacacctgcccatcagcgcattctgcctgcaccttgcctctcccaagctctggttgcttctgagaactgaaagcgcttctctcactggaagagcccagcactggtcctggctctcactgggactcctttggatcctagatcagcgggaccctgcaggaagacagtggggtctattgcctggggggtaaatctgtgctgcaaaccctgatggtttccactagaaggccctgcctgttcgaatgttggtaatgggtaatgaccttgcccttcaggaaattctttctggcataaaatgagacttctgtgcctgtgactactgaaaaggatgtgacagatgcaagaaatactctgagggaaaaagtaatttaacctaatgtaaagggtttttcggtggtaaaatgtacataataaaaaacttaccattttaaccattttaaagtttatacttcagtggcattaagtacattcacattgttgagccgccatcaccagcatccatctagagcattttcatcttcccaaactgaagctctgtcccattaaacaataagtaccattatccttacccccagcccctgtaaaccacgattctactttttgtcactataaatttgactattcgagttacctcatatgtatgaaatcagacagtatttatttttttgtgactggcatatttcacttagcataatgtcttcaaggtccattcatgttgcagcaaatgtcaggatttccttcctttataaggctaaataatattctgttgtatgtgtatagtacattctgtaaatccactcatcatccgtcaataaacgcttgagttggttccaccttttggctatggacatggatgtgcaaatattatgtttgagtccctgctttcgcttcttttgggtatatatccagaagtagaatttgaatcaaacagtaattctatttttatttttatttttgttatactttaagttctagggcatatgtgcacaacgtgcaagtttgttacataggttacataggtatacatgtgccatgttggtttgctgatgggtttttggatcccatcaattcgacatttacattaggtatttctcctaatgctatccctcccccagtcccccaccccctgacagaccctggtgtgtaatgttccccaccctatgtccatgtgttcccattgttcaattcccacctatgagtaagaacatacggtgtttgcttttctgtctttgtgatagtttgctgagaatgatggtttccagtttcatccatgtccctacaaaggacctgaactcatccatttttatggctgcatagtattccatggtgtatatgtgacacattttttaaatcagtctatcattggtggacctttgggttggttccaagtctttctattgtgaatagtgccacaattaacatacgtgtgcatgtgtctttataagtagcatgatttataatcctttgggtatatacccagtaatgggatcgctgggtcaaatggtatttctagttctagatccttgaagaatcaccgcactgtcttccacaattgttgaactaatttacacccccaccaacaaagtaaaagcgttcctatttctccacatcctctccagcatctgttgtttcctgaccttttcatgatcaccattctaactggtgtgagatagtatctcattgtggttttgatttgcaattctctgatgaccagtgatgatgagcatttttccatgtgtctgttggatgcataaatgtcttcttttgagaagtgtctgttcatatcctttgcccacttgttgatggggttctttgtttttttgcttgtaaatttgtttaagttctttgcagattctggactttagccatttgtcagatgggtagattgcaaaaattttctcccattctgtaggttgcctgttcactctgatgatagtttcttttgctgtgcagaagctctttagtttaattagatcccatttgtctattttggcttttgttgccattgcttttggtgttttagtcatgaagtcttttcccatgcctaagtcctgaatggtattgcctaggttttcttctagggcttttatggttttaggtctaacatttaagtctttaatccatcttgagttaatttttgtataaggtataaggaagggatccagtttcagctttctatatatggctagccagttttcccagcaccatttattaaatagggaatcctttccccattgcttgtttttgtcaggtttgtcaaagatcagatggttgtagatgtgtggtgttatttctgaggcctctattctgttcccctggtctatatgttttggtatcagtaccatgctgtttaggttactgtagccttgtagtatagtttgacatcaggtaacacaatgcttccagctttgatgtttttgcttaggattgtcttggcaatgcaggctcttttttggttccatataaactttaaagtggttttttccaattctgtgaagaaagtcattggtagcttgatggggatggcattgaatctataaattaccttgggcagtaaggccattttcacgatattgattcttcctacccatgagcatggaatgttcttccatttgtttgtatcctcttttatttccttgaacagtggtttgtagttctccttgaagaggtccttcatgtcccttgtaagttggattcctagatattttattctctttttagcaattgtgaatggtatttcactcatgacttggctctctgtttgtctgttattggtatatgggaatgcttgtgatttttgcacattgatttttgtttcctgagactttgcagaagttgctcatcagctttcgggctgagatgatggggttttctaaatgtaaaatcatgtcatctgcaaacagggacaatttgacttcctcatttcctaattgaataccctttatttctttctcttgcctgattgccctggccagaacttccaacactatgttgaataggagtggtgagagagggcatccttgccttgtgtcggttttcaaaaggaatgcttccagtgtttgcccattgattatgatattggccgtgggtttgtcataaatagctcttattattttgagatagattccatcaatacctagtttattgagagtttttagcatgaagtgctgttgaattttgttgaaggccttttctgcatctattgagataatcatgtggtttttgtcattagttctgtttatgtgatgtattacgtttattgatttgcatatgttgaaccagccttgcatcccgtggatgaagccaacttgatcttggtggataagcttttggatgtgctgctggattcagtttgccagtattttcttgaggatttttgcatcgatgttcaacagggatattggtctaaaattatctttttttgttgtgtctctgccaggctttggtatcaggatgatgctggcttcataaaatgagttagggaggattccctctttttctattgataggaatagtttcagaaggaatggtaccagctcctctttgtacctctggtagaactcagctgtgaatccatctggttctgaacttttctggttggtaggctattaattattgcctcaatttcagaacctgttattagtctattcagagattcaacttcctcctggtttagacttgggagggtgtatgtgtccaggaatttatccatttattctagattttctagtttatttgcatagaggtgtttatagtattttctgatggtagtttgtatttccatgggatcggtggtgatatcccctttaccattttttataacatctatttgattcttctctctttttttctttattagccttgctagcagtctatcaattttgttgatattaaaaaaaacagctcctggattcactgattttttgaagggatttttgtgtctctatctccttcatttctcctctgatctcagttatttcttgccttctgctagcttttgaatttgtttgctcttgcttttctagttcttttacttgtgatgttagggtgtcatttttagatctttcctgctttctcttgtgagcatttagtgctataaatttccctctacacacgctttaaatatgtcccagagattctggcacgttgtgtctttgttctcattggtttcaaagaacatctttatttctgccttcatttcattatttactcagtagtcattcaggagcacgttgttcagtttccatgtagttgtgtggttttgagtgagtttcttaatcctgagttctaatttgattgcactgtggtgtgagagacagtttgttgtgatttccgttcttttacatttgctgaggagtgctttactcccaactatatggtcaatttttgaataagtgtgatgtggtgctgagaagaatgtatattctgttgatttggggtggagagttctgtagatgtctattaggtctgcttggtgcagagctgagttcaagtcctggatatccttgttaacattctgtctcattgatctgtcttatattgacagtggggtgttaaagtctcccattattattgtgtgggagtctaagtctctttgtaggtctctaaggacttgctttatgaatctgggtgctcctgtattgggtgcatatatatttaggatagttaactctttttgttgaattgatccttttaccattatgtaatggccttctttgtctcttttgatctttgtgggttcaaagtctgttttatcagagactaggattgcaactcctgctttttttttttttgctttccctttgcttggtagatcttccttcacgcctttattttgagcctatgtgtgtctctgcatgtgagatgggtctcctgaatacagcacattagtgggtcttgactcttgatccaatttgccagtctgtgtctttttattggggcatttagcccatttacatttaagattaatattgttatgtgtgaatttgatccattatgatgttagctggttattttgcatgttaattgatgcagtttcttcctagccttgatggtctttacaatttggcatgtttttgcagtgtctggtaccagttgttcctttccatgttttgtgcttccttcaggagctcttgtaaggcaggcctggtggtgacaaaatctctcagcatttgcttgtctataaaggattttatttgtccttcacttatgaagcttagtttggctggatatgaaattctgggttgaaaattcttttatttaagaatgttgaatattggctcccactttcttctggcttgtagggtttctgctgagaggtccactgttagtctgatgggcttccctttgtgggtaacccaacctttctctctggctgcccttaacattttttccttcatttcaaccttggtgaatctgacaattgggttgctcttctcgaggagtatctttgtggtgttctctgtatttcctgagtttgaatgttggtctgcctttctaggttggggaagctctcctgtataatatgctgaagagtgttttctaagttggttccattctccccatcactttcaggtacaccaatcaaatgtagatttggtcttttcacatagtcccatatttcttggaggttttgttcatttcttttcactcttttttctctaatcttgtcttctcattttattttattaatttgactttcaatcactgatatcctttcttccacttaatcgaatcagctattgaagcttttgcatgtgtcatgaaattctcgtgctgtggttttcagctccatcaggtcatttaaggtcttctctgcactgtttattctagttagccatttgtctaaccttttttcaaagtttttagcttccttgcaatgggttgaaacatgctcctttagctcagatatgtttgttattaccgaccttctgaagcctacttctgtcaacttgttaaactccgtccatttttgttctgttgctggcgaggagctgcaatcccttggaggagaagagacgctctggtttttggaattttcagcttttctgctctggtttctccccatctttgtggttttatctacctttggtctttgatgttggtgacctacagatggggttttggtgtggatgtccttttcattgatgttgatgctattcctttctatttgttagttttccttctaacagtcaggcccctcagctgcaggtctgttggagtttgctggaggtccactccagaccgtgtttgcctaggtatcaccagcagaggctgcagaacagcaaatattgctgtctgatctttcctctggaagcttcatcccagaagggcacctacctgtatgaggtgtctgtcggcccctactgggaggtgtctcccagtcaggctacacggggattagggacccacttgagggggcaatctgtccattctcagagcttgaacactgtgctggaagaaccactgctctcttcagaactgtcagacagggacgtttaagtctgcagaagttttctgctgcctttggttcagctatgccctgcccacagaggtggagtccagagaggcagtaggccttgctgagctgtggtggcctctgcccagttcgagcttcctggccactttgtttacctactcaagcctcagcaatggcagatgcccctccccctgccaggctgcagctccgcaggtcgatctcagactgttgtgctagcagtgagcaaggctctgtgggtgtgggactcacctagccaggcatgggagggaatctcctggtctgccgggtgcgaagaccataggagaagtgcattatttggacaggggtgtaccattcctccaggtacagtctgtcacggcttcccttggataagaaagggaaatcccctgaccccttgtgcttcccgggtgaggtgacgccctaccctgcttcagcttgctctccatgggctgcaccccctgtccaaccagtcccaatgagatgaaccaggaatctcagttggaaatgcagaaatcacccatcttttgcgtcaatctcgctgggagctgcagaccaaagctattcgtattcagccatcttggcagcgaccagtaattctatttttaattctttgaggaactattgtaagttttccacagtagctgcaccattttacattcccaccagcagtgaagaagagtactaatttttacacattcttaattacagccaccttcgtgggtgtaacagggtatctcactatggccttgatttgtgtttccctaatgatgagtgatgtcgagtagcttttcatgtgtgtactggccatgcatgcatgtatctttgcagaaatatcgattcaagcctattgcccatctttggtcatgttgtttgctctgtttttgttgtcaagttgtaggagttccttatatattttggatactaaccacttgtcagatatgtaattttgcagatattttctccttttctgtgggttgccttttcattctgctgatagtgctagtgccctttttgattttatattattattgatatggtttggctctgtgtccccacccaaatctgttgagttgtgatcctcagtgttggaggagggacctggtgggaggttattggatcataagggcaggttcttttttaaaaattattttattattattttttaagttccagggtacaggtatgtgcagatttgttacataggtaaacatgtgtcatggtggtttgctgcacctgacaacccattacctaggtattaagcccagcatgcatcagctcttttccctaatgctctccccatcccaccttcccccaactggccccagtgtgtgttgttaccctccctgtgtccatgtgttctcattattcagctcccacttataagtgagaatatgtggtgtttggttttctgttcctgcattagtttgctgaggagaatggcttccagcttcacccatgtctctgcaaaggacatgatctcattcctttttatggctgcacagtattccatcgtgtatatgtaccattctttatccaatctatcattgatgggcatttgggttgattccatgtctttgctattgtgccacaatgaacatatgagtgcatgtatctttataatagaatgatttatattcctttgggtatataaccagtaatgggattgctgagtcaaacggtatttctggttctaaatctttgaggaatcaccactctgtcttccacagtcattgaactaatttacatttccaccaacagtgtaaaagcattcctacttctctgcattctcagcagtatctgtttttttttttttttggactttttaataaaaagtggaaatgcattttgcattcacataacgtcagttctgtttcgtttcatggacaatgaagtataacttacagactatagaaagcagagacactctcatatttttacttatgtgaataaaagttgggcccatctgctccctctcctttctttaacaatagcactactgagctgtgattttgcccagtatcatcccccaggagaccagttcccagcctcttggcagctgggtgtggccgagtgagtcatctctggccagggagatgagagcaaaggactgcagccacagaggctttgagctccattgcccataccctgcttttcttatgaagagaatttattctcatcccagtggtatcactgaaaagctaaaggctgggaagatgaatggaagggcccgtgctttggacattctgttcccatgaatcatatttgcttgggaaattaagcaggaacgagagcattttggaaaacatgcttcagtttcactttcaaaacaggaacagagaaaaagtaaaaacgagagaggaaaaccagctgtgatggctaaattttttgtgccaacttggctaggccatggtgccagttgtttggtgaagcaccaatctgtgtgttgtcatgagggtgttttgtagatattgttaacatgtacaatcggttgattttcagtgaagaaaataaccttagataatgtggctggactccattcaattagttgaaggacttaagggcaaaaactgagatttccagaagaagaatgaagtctgttttagactgtaacatatcctgcctgcctgacaaatcctggacttgccaggccccacaatcacataaacagattccttaaaataaatctttttacatatatatgtgtgtgtatatatatatatatatatacacacacacacacacattctcttaataaatataaatatatcttaatatatgtacataatatatatgtatacatttcatgttatatatgtataattgtatatttatgtgcacataatatatatcctattggtacaatctctttatatatatatagatgtgtgtgcgtatatatatcctgttggctctgtttctctggagaaaccaagttgatacatgtattagtctgttctcacactgctataaagaaatacctgagactgggtaatttataaaggaaagagttttaattgactcacagttccacgtggctgaggaagcctcaagaaacttatgaccatggcagaaggtgaaggggaagcaaggatgttcttcacacagcagcaggagacagtgtatgtaaagaagaaactgtcaaacatttacaaaaccattagattgcatgagaactcaccatcataaagatagcatggggaaaactgcacccatggtccaatcacctcccaccaggtccctccctcaacacggggattatggagattacaattcaagatgagatttgagtgtggacacagccaaaccatatcaatacactgactaattcagcaagaagagacagacttccctatgaacttaaggactgggaccaatttgatacaaagcacaatgtggttctgaaggctggcagagagggagatgaggacgaaccttgattcaatttctcttgcaggggccactgaaaaagtgagagacacgtgagctattgctgaattagaaaacactgactgggactatctaaagtgaaattagccagacacaaaaagacaaataccgcatgttctcacttatatgtgggagctaaaaagtctgatcacatggaagcagagagtggaaagatagataccagagactgggaagggtgagtcactgaagggggaggatgaagagaagtgggttacagggtacaaatgtacagttagatagaagaaacacatctgatgtttgatagcagagtagggtgactatagttaaacaaaaatgtattgtattctggtgatggactccctaaacagtctgacctaatcactatgcatttatataaatgcaacaaaatttcacatgtgccccataaatttgtacaaataaaaacaaacaaaacaaaattcttatgcctaaaaaaggaagaatgaaagaacgaaagaaagaaagagaaagaaagaaggaaagaaaaagaaagaaagaaagaaagaaagaaagaaagaaagaaagaaagaaagaaagaaagaaagaaagaaacaaagaaagaaacaaagaaacaaagaaagagtgaatggggccaaaggcatctcactgatggagagtagagtggtctcagaggacaggccagaatgacacctcggggggttggtggggtgcaggtaggatccagggagctactggcatctgcggggagcctcttaggtctgcacaaagaggactcccagtaagaacagttgaaggtttgcttcctacaactgttagaatcacctgcggcgtgtgactttagttgtctggatggggcttgtgaaccagcatccattcaatgcatccaggtgattcttatagttgttggttcaggttcttgacttcgccacacaaaataatttgagagcaagtccaaagtaacagtaggcaaagaagtctgttgcaaagcaacagctacattctgagaggcagagggggctgctcagaagaaacagcagctagtgccgtaagggaaattccctttatgggagctgttcattcacattcataaaatactggtgaggtcaagtatgcaaaggtggacttgcggttgacacatgcactcagcatctatgtgctctaacatgcatcacgtgcatcatcagcacataaaatctccacctaggaatgtgttttttactattaagatgagggaaatgacactataagccaaaccttcagcctacttgcataggtgggaccccagagaagttcttagccctccactcccctcaaagtaggaatttgtagctaatatcttcttgggctttggagctgattggctggagattagggaagctacttcatgaacaaggggcttttgttctctttcccagctgcgttgagtatcaggaacttaagactctggcggttggctggtaccgtgtaggactgcttaccttgcaaaagagttagatgctgacacgtaaggatgcaagtgaaaggagcccactgagaagtgagcccacagggcttcacacaagcggatgagccagtatggccccctaaccttccttatccagcctcattctgtgcccccaggaatgaggaccacagtcttagcaactgggccaggtcttctgaccaacttcaccaacgtgaaatcatcgaagctccactggtggtttctcaggtgatgcggacactgtaggtgaagatacaggtttgattcagcttcaagaggacgtgcttgataaactcaaggaaaataagagaggatgagcagaggtgggacctaccaaaggggagtcagtcaccggtgtctcaggtcagtgctcattctgatggaaaacagttatcccactcagggtgagagaataaacaagacctgttcaacatcacatgacttgagcagactggaagtgactgatttatatccttccttagggtatcccttgggcaaaatgcagtgactgcgtaagaagaggaaaggagtggggcttgaacacaaggaaagaatcaaggactttccaaaatttcactgcaagtaggcatgagcacacactgcttctcatgtttactactttgtctcacagcttgtgaacacacattcttgggccacgccccagggtttctaattcaacaggctggggtgtggcctaagaacttgcatctcttacaagatctctggtggtgctgctgctgctggtccaggaactgcactttgggattctctacctttaaaaaatacatccaatcactgtgagaaatgggctacaggcactgcactgtcacctgtcacgcatgcactaaggctgggggatctcagtggctgagagcctgagactgagccaaataagaatttgagaagaattgtttgtacactttaagaattttattgtgggctgtgatttctttagacttcaatgtcaggacttcaacttgcaaggggagttgatcttgtgtttagtttttcctgggaatgagacgatgggggttgggtggtaaatttatggtcaagtttggggcatttgcacattggcttgtaactggagtaagttgtggtgttgtttaattttgtcgaggcttgactggaacatatggctggaaattatttgggactgaaagagaagcggtagtaaacatttgccttaggtaaaatgtagctttgggatgaaacttttttaaacagctttactgacatttaattttcacatacctcacccacttaaagtatacaattcagtggttccgagtatattcacaaaattgtgcaaatggacgtataatctgattttagaacattttcatgatccctccaaggaaacttcctattagcagtcactctgccttctattgcccccagccctagacaaccactaatctacagcctgtctctatacatttttctgttctgggtatttcatataaattgaatcatattgtatgaatgctgacttgtttcagcatggcttgctggcttctttcacttagcacattttcaagattgctccacattgtagcacgggtcatgtcattctcttttatgcccgttcattttccattgtatgaatagactaacactatatcttgattatccattcgtcagttgatggacatttgaggttttttttaatatatttttttctgattttaataatgatgctatgaactttcatgtgtaaatattttggtgaacttaatgtttttatttgtagctgacatataaatatgagtagagttgctaggttatatggtaggtctaaccttttgaaaacttgtgaaactgttttccaaagcagctgcaccattttacattcccaccagctatgtataaagattccaatttgttatttgtggtctctttgaccacaaccatgtagtggctttgaagctgctttttactgtggttttgatttgccttttcctaatagctaatggtgttatgcacgtttttatgcgtttattggctatttacatatcttctttggaaaaacgtttattcaaatcctttggaacttttaaattggtttgtttctttaaaaactttgagttatataaaaattaggttatttgcctttatttttaaattggtttttttaaaaagaatttttaattgggttaccagtcttattgagttgtaagagttcattatatgttctgaatacaagttctatatcagatatataatttgcaaaatttttttcctatcatgtgtgttgtttttttttgtttttgtttttgtttttgggaggggatgaatttaattagtgagttgttctggcctatttgagggtttcctgagttcaaatcaattccatttatgagaagtcccgggggatccccaagaaatttggttggtactggggaggtgcctcatgaagatagaaaaaggatgtccagattgattgctgatttcaatcccaggggcacagctacacttctggctgaccacagcttaacgatgagcccgattatatctcaataagggaagttacagccaatttctccttgaacacaagtccattgcagcatcttcagaggcagggccagcctctatttttcagtcatggtgacatctgtggtccttgcatttttaagagtggcctgctacttgtaaggtccagggggcaggtcctccactttctgcaagctggtccttgaggcattacttctgaaacagtcaagaaatgtcatgggactgtgggtctgagaaccgactgatgagttatttttgtctgtcagtgaggacagacaagagcacagggctggaaacccaacccaactggcctggtggttggttcacataactaggaagttcagagcaagggcgggcatcaggctctgcttggtgcagggactccattataacccacctgctccttgctctctgtttctctctctctttttctgagacacagggtctcgctcttttgcccaggctggagttcagtagtgaaatcatggctcattgcagcctcaaactgctgagctcacgcagtcctcccgcgtcagcctccagaatagctgggagtgcaccaccaggcctggtttccttgctgtctcttcagttttgttgcttcccataacttggcttcattctcaaacaggctccaagtgggccccagacctcaagtcttttttatcttcacactcagcagggaaggaagaacccacttatcacacagtcaaacaaaatcccaccgttaagcctatgtgggtcctgggcagccacacataggtcacgtgttgtcctcatgccaatcatgaggcttcaggggagggagacccgctgccctgaccagcttagccagggtcaagtgctccaagctgtggtccaaagggtagagtcagcttccctggaaaaaggcggagtgagaggggaggaggggtgaatcctcacggggaaactgctattgttgttgtaagaaggtggggcagtcatggcttgtgagtcagacgctggccgctggcctcagaggtgtgtttggtaatgatgcctccatgcatacagcatgagctgcccagtcagagaaggcacagagcctgtggggtaaacacttcccagcatcattccctgcctggtagccattcaggaaaggcagcattttcctcagtcttttcatcagggtcctggatttgggtaaaataaatagataaataaataactgttgctattagtgatctcaagtccctc
